(19) United States
(12) Patent Application Publication
(10) Pub. No.: US 2022/0396796 A1
(43) Pub. Date: Dec. 15, 2022

(54) RNA FOR CANCER THERAPY

(71) Applicant: CureVac AG, Tübingen (DE)

(72) Inventors: Mariola FOTIN-MLECZEK, Sindelfingen (DE); Aleksandra KOWALCZYK, Stuttgart (DE); Regina HEIDENREICH, Tübingen (DE); Ulrike GNAD-VOGT, Mühltal (DE); Ute KLINKHARDT, Frankfurt (DE); Katja FIEDLER, Bad Urach (DE)

(73) Assignee: CureVac AG, Tübingen (DE)

(21) Appl. No.: 17/571,893

(22) Filed: Jan. 10, 2022

Related U.S. Application Data
(63) Continuation of application No. 16/326,281, filed on Feb. 18, 2019, now abandoned.

(30) Foreign Application Priority Data
Aug. 19, 2016 (EP) PCT/EP2016/069753
Jun. 13, 2017 (EP) PCT/EP2017/064463

(51) Int. Cl. C12N 15/117; A61K 38/20; A61K 39/00; A61P 35/00

(52) U.S. Cl. CPC C12N 15/117; A61K 38/208; A61K 39/001186; A61K 39/001152; A61K 39/001119; A61K 39/001122; A61K 39/001166; A61K 39/001182; A61K 39/001104; A61K 39/001168; A61K 39/001184; A61K 39/001106; A61P 35/00; C12N 2310/531; C12N 2320/32; A61K 2039/53; A61K 2039/54

(57) ABSTRACT

The present invention relates to RNA, particularly an immunostimulatory RNA (isRNA), a coding RNA or a combination thereof, for use in the treatment or prophylaxis of a disease, in particular a tumor and/or cancer disease. The present invention also provides pharmaceutical compositions, and a kit comprising the RNA(s). Further, the invention also comprises medical uses of the RNA(s) and compositions comprising the RNA(s).

### CROSS-REFERENCE TO RELATED APPLICATIONS

[0001] This application is a continuation of U.S. application Ser. No. 16/326,281, filed Feb. 18, 2019, which is a national phase application under 35 U.S.C. § 371 of International Application No. PCT/EP2017/025230, filed Aug. 14, 2017, which claims benefit of International Application No. PCT/EP2017/064463, filed Jun. 13, 2017, and International Application No. PCT/EP2016/069753, filed Aug. 19, 2016, the entire contents of each of which are hereby incorporated by reference.

### BACKGROUND OF THE INVENTION

[0002] The present invention relates to RNA, particularly an immunostimulatory RNA (isRNA), a coding RNA or a combination thereof, for use in the treatment or prophylaxis of a disease, in particular a tumor and/or cancer disease. The present invention also provides pharmaceutical compositions, and a kit comprising the RNA(s). Further, the invention also comprises medical uses of the RNA(s) and compositions comprising the RNA(s).

[0003] Cancer diseases, also known as malignant tumors, are a group of diseases involving abnormal cell growth with the potential to invade or spread to other parts of the body. In 2012, about 14.1 million new cases of cancer occurred globally (not including skin cancer other than melanoma).

[0004] The standard treatments of cancer include chemotherapy, radiation and surgery, or immunotherapy wherein these treatments are applied individually or in combination. Cancer immunotherapy which is focused on stimulating the immune system through vaccination, adoptive cellular immunotherapy, immune checkpoint blockade or other immunostimulants or immunomodulators to elicit an anti-tumor response.

[0005] Some approaches use gene therapy and genetic vaccination for treatment of cancer or other tumor diseases. Gene therapy and genetic vaccination are molecular medicine methods, which are based on the introduction of a nucleic acid into cells or into tissues of a patient. Subsequently the information encoded by the nucleic acid introduced is processed in the organism, i.e. resulting in expression of a therapeutic peptide or protein or in expression of an antigen, which is coded by the nucleic acid.

[0006] Conventional gene therapeutic methods, including gene therapy and genetic vaccination are based on the use of DNA molecules in order to transfer the desired genetic information into the cell. Various methods have been developed for introducing DNA into cells, such as calcium phosphate transfection, polybrene transfection, protoplast fusion, electroporation, microinjection and lipofection. DNA viruses may likewise be used as a DNA vehicle achieving a very high transfection rate. The use of DNA entails the risk of the DNA being inserted into an intact gene of the host cell's genome by e.g. recombination. In this case the affected gene may be mutated and inactivated or may give rise to misinformation. Another risk of using DNA as a pharmaceutical agent is the risk of inducing pathogenic anti-drug antibodies (anti-DNA antibodies) in the patient, which may result in autoimmune adverse effects.

[0007] The use of RNA as a gene therapeutic agent or genetic vaccine is substantially safer, because RNA does not involve the risk of being integrated into the genome inducing an undesired pathogenic induction of anti-drug antibodies.

[0008] Thus RNA expression systems have considerable advantages over DNA expression systems in gene therapy and in genetic vaccination although it has been assumed for a long time that the instability of mRNA or of RNA in general may pose a serious problem for medical methods based on RNA expression systems.

[0009] The instability of RNA is due, in particular, to RNA-degrading enzymes (ribonucleases—RNases). There are also many further processes that destabilize RNA, wherein interaction between the RNA and proteins often appears to play a crucial role. Some measures for increasing the stability of RNA have been proposed, thus enabling the use thereof as a gene therapy agent or RNA vaccine.

[0010] With respect to the ex vivo stability of RNA, European patent application EP 1 083 232 A1 describes a method for introducing RNA, in particular mRNA, into cells and organisms, wherein the RNA forms a complex with a cationic peptide or protein.

[0011] The application of mRNA for the treatment and/or prophylaxis of cancer is known. For example, international patent application WO 03/051401 A2 describes a pharmaceutical composition comprising at least one mRNA, which contains at least one region encoding an antigen from a tumor, combined with an aqueous solvent and preferably with a cytokine e.g. GM-CSF. The pharmaceutical composition is proposed for use in therapy and/or prophylaxis of cancer.

[0012] International patent application WO 2006/008154 A1 discloses an mRNA mixture for vaccination against tumor diseases, wherein at least one type of mRNA contains at least one tumor antigen-encoding region. At least one other mRNA contains at least one type of an immunogenic protein-coding region. Nevertheless there is still a need for an effective treatment of cancer or tumor diseases. Therefore it is the object of the underlying invention to provide an approach for effective treatment of tumor diseases wherein tumor tissue and cancer cells are specifically destroyed.

[0013] This object is solved by the subject-matter of the claims. Particularly, the object underlying the present invention is solved by isRNA, coding RNA or a combination thereof for use in the treatment or prophylaxis of tumor and/or cancer diseases. According to further aspects of the invention, the object is solved by a pharmaceutical composition, by a kit or kit of parts, and by a method of treatment of tumor or cancer diseases.

[0014] For the sake of clarity and readability the following definitions are provided. Any technical feature mentioned for these definitions may be read on each and every embodiment of the invention. Additional definitions and explanations may be specifically provided in the context of these embodiments.

[0015] Immune system: The immune system may protect organisms from infection. If a pathogen breaks through a physical barrier of an organism and enters this organism, the innate immune system provides an immediate, but non-specific response. If pathogens evade this innate response, vertebrates possess a second layer of protection, the adaptive immune system. Here, the immune system adapts its response during an infection to improve its recognition of the pathogen. Additionally to infections of pathogens this response can also be directed against malignant tumor cells of the body. The improved response is then retained after the pathogen or tumor cell has been eliminated, in the form of an immunological memory, and allows the adaptive immune system to mount faster and stronger attacks each time this pathogen is encountered. According to this, the immune system comprises the innate and the adaptive immune system. Each of these two parts contains so called humoral and cellular components.

[0016] Immune response: An immune response may typically either be a specific reaction of the adaptive immune system to an antigen, with antigens being tumor derived (so called specific or adaptive immune response) or an unspecific reaction of the innate immune system (so called unspecific or innate immune response).

[0017] Adaptive immune system: The adaptive immune system is composed of highly specialized, systemic cells and processes that eliminate or prevent pathogenic growth. The adaptive immune response provides the vertebrate immune system with the ability to recognize and remember specific pathogens (to generate immunity), and to mount stronger attacks each time the pathogen is encountered. The system is highly adaptable because of somatic hypermutation (a process of increased frequency of somatic mutations), and V(D)J recombination (an irreversible genetic recombination of antigen receptor gene segments). This mechanism allows a small number of genes to generate a vast number of different antigen receptors, which are then uniquely expressed on each individual lymphocyte. Because the gene rearrangement leads to an irreversible change in the DNA of each cell, all of the progeny (offspring) of that cell will then inherit genes encoding the same receptor specificity, including the Memory B cells and Memory T cells that are the keys to long-lived specific immunity. Immune network theory is a theory of how the adaptive immune system works, that is based on interactions between the variable regions of the receptors of T cells, B cells and of molecules made by T cells and B cells that have variable regions.

[0018] Adaptive immune response: The adaptive immune response is typically understood to be antigen-specific. Antigen specificity allows for the generation of responses that are tailored to specific antigens, pathogens or pathogen-infected cells. The ability to mount these tailored responses is maintained in the body by “memory cells”. Should a pathogen infect the body more than once, these specific memory cells are used to quickly eliminate it. In this context, the first step of an adaptive immune response is the activation of naïve antigen-specific T cells or different immune cells able to induce an antigen-specific immune response by antigen-presenting cells. This occurs in the lymphoid tissues and organs through which naïve T cells are constantly passing. Cell types that can serve as antigen-presenting cells are inter alia dendritic cells, macrophages, and B cells. Each of these cells has a distinct function in eliciting immune responses. Dendritic cells take up antigens by phagocytosis and macropinocytosis and are stimulated by contact with e.g. a foreign antigen to migrate to the local lymphoid tissue, where they differentiate into mature dendritic cells. Macrophages ingest particulate antigens such as bacteria and are induced by infectious agents or other appropriate stimuli to express MHC molecules. The unique ability of B cells to bind and internalize soluble protein antigens via their receptors may also be important to induce T cells. Presenting the antigen on MHC molecules leads to activation of T cells which induces their proliferation and differentiation into armed effector T cells. The most important function of effector T cells is the killing of infected cells by CD8+ cytotoxic T cells and the activation of macrophages by Th1 cells which together make up cell-mediated immunity, and the activation of B cells by both Th2 and Th1 cells to produce different classes of antibody, thus driving the humoral immune response. T cells recognize an antigen by their T cell receptors which do not recognize and bind antigen directly, but instead recognize short peptide fragments e.g. of pathogen-derived protein antigens, which are bound to MHC molecules on the surfaces of other cells.

[0019] Cellular immunity/cellular immune response: Cellular immunity relates typically to the activation of macrophages, natural killer cells (NK), antigen-specific cytotoxic T-lymphocytes, and the release of various cytokines in response to an antigen. In a more general way, cellular immunity is not related to antibodies but to the activation of cells of the immune system. A cellular immune response is characterized e.g. by activating antigen-specific cytotoxic T-lymphocytes that are able to induce apoptosis in body cells displaying epitopes of an antigen on their surface, such as virus-infected cells, cells with intracellular bacteria, and cancer cells displaying tumor antigens; activating macrophages and natural killer cells, enabling them to destroy pathogens; and stimulating cells to secrete a variety of cytokines that influence the function of other cells involved in adaptive immune responses and innate immune responses.

[0020] Humoral immunity/humoral immune response: Humoral immunity refers typically to antibody production and the accessory processes that may accompany it. A humoral immune response may be typically characterized, e.g., by Th2 activation and cytokine production, germinal center formation and isotype switching, affinity maturation and memory cell generation. Humoral immunity also typically may refer to the effector functions of antibodies, which include pathogen and toxin neutralization, classical complement activation, and opsonin promotion of phagocytosis and pathogen elimination.

[0021] Innate immune system: The innate immune system, also known as non-specific immune system, comprises the cells and mechanisms that defend the host from infection by other organisms in a non-specific manner. This means that the cells of the innate system recognize and respond to pathogens in a generic way, but unlike the adaptive immune system, it does not confer long-lasting or protective immunity to the host. The innate immune system may be e.g. activated by ligands of pathogen-associated molecular patterns (PAMP) receptors, e.g. Toll-like receptors (TLRs) or other auxiliary substances such as lipopolysaccharides, TNF-alpha, CD40 ligand, or cytokines, monokines, lymphokines, interleukins or chemokines, immunostimulatory nucleic acids, immunostimulatory RNA (isRNA), CpG-DNA, antibacterial agents, or anti-viral agents. Typically a response of the innate immune system includes recruiting immune cells to sites of infection, through the production of chemical factors, including specialized chemical mediators, called cytokines; activation of the complement cascade; identification and removal of foreign substances present in organs, tissues, the blood and lymph, by specialized white blood cells; activation of the adaptive immune system through a process known as antigen presentation; and/or acting as a physical and chemical barrier to infectious agents.

[0022] Adjuvant/adjuvant component: An adjuvant or an adjuvant component in the broadest sense is typically a (e.g. pharmacological or immunological) agent or composition that may modify, e.g. enhance, the efficacy of other agents, such as a drug or vaccine. Conventionally the term refers in the context of the invention to a compound or composition that serves as a carrier or auxiliary substance for immunogens and/or other pharmaceutically active compounds. It is to be interpreted in a broad sense and refers to a broad spectrum of substances that are able to increase the immunogenicity of antigens incorporated into or co-administered with an adjuvant in question. In the context of the present invention an adjuvant will preferably enhance the specific immunogenic effect of the active agents of the present invention. Typically, “adjuvant” or “adjuvant component” has the same meaning and can be used mutually. Adjuvants may be divided, e.g., into immuno potentiators, antigenic delivery systems or even combinations thereof. The term “adjuvant” is typically understood not to comprise agents which confer immunity by themselves. An adjuvant assists the immune system unspecifically to enhance the antigen-specific immune response by e.g. promoting presentation of an antigen to the immune system or induction of an unspecific innate immune response. Furthermore, an adjuvant may preferably e.g. modulate the antigen-specific immune response by e.g. shifting the dominating Th2-based antigen specific response to a more Th1-based antigen specific response or vice versa. Accordingly, an adjuvant may favourably modulate cytokine expression/secretion, antigen presentation, type of immune response etc.

[0023] Immunostimulatory/immunostimulating RNA: An immunostimulatory/immunostimulating RNA (isRNA) in the context of the invention may typically be an RNA that is capable of inducing an innate immune response by itself. It usually does not comprise an open reading frame and thus does not provide a peptide-antigen or immunogen but elicits an innate immune response e.g. by binding to a specific kind of Toll-like-receptor (TLR) or other suitable receptors. Therefore immunostimulatory/immunostimulating RNAs are preferably non-coding RNAs. However, of course also mRNAs having an open reading frame and encoding a peptide/protein (e.g. an antigenic function) may induce an innate immune response.

[0024] Antigen: The term “antigen” refers typically to a substance which may be recognized by the immune system and may be capable of triggering an antigen-specific immune response, e.g. by formation of antibodies or antigen-specific T-cells as part of an adaptive immune response. An antigen may be a protein or peptide. In this context, the first step of an adaptive immune response is the activation of naïve antigen-specific T cells by antigen-presenting cells. This occurs in the lymphoid tissues and organs through which naïve T cells are constantly passing. The three cell types that can serve as antigen-presenting cells are dendritic cells, macrophages, and B cells. Each of these cells has a distinct function in eliciting immune responses. Tissue dendritic cells take up antigens by phagocytosis and macropinocytosis and are stimulated by infection to migrate to the local lymphoid tissue, where they differentiate into mature dendritic cells. Macrophages ingest particulate antigens such as bacteria and are induced by infectious agents to express MHC class II molecules. The unique ability of B cells to bind and internalize soluble protein antigens via their receptors may be important to induce T cells. By presenting the antigen on MHC molecules leads to activation of T cells which induces their proliferation and differentiation into armed effector T cells. The most important function of effector T cells is the killing of infected cells by CD8+ cytotoxic T cells and the activation of macrophages by Th1 cells which together make up cell-mediated immunity, and the activation of B cells by both Th2 and Th1 cells to produce different classes of antibody, thus driving the humoral immune response. T cells recognize an antigen by their T cell receptors which does not recognize and bind antigen directly, but instead recognize short peptide fragments e.g. of pathogens' protein antigens, which are bound to MHC molecules on the surfaces of other cells.

[0025] T cells fall into two major classes that have different effector functions. The two classes are distinguished by the expression of the cell-surface proteins CD4 and CD8. These two types of T cells differ in the class of MHC molecule that they recognize. There are two classes of MHC molecules—MHC class I and MHC class II molecules—which differ in their structure and expression pattern on tissues of the body. CD4+ T cells bind to a MHC class II molecule and CD8+ T cells to a MHC class I molecule. MHC class I and MHC class II molecules have distinct distributions among cells that reflect the different effector functions of the T cells that recognize them. MHC class I molecules present peptides of cytosolic and nuclear origin e.g. from pathogens, commonly viruses, to CD8+ T cells, which differentiate into cytotoxic T cells that are specialized to kill any cell that they specifically recognize. Almost all cells express MHC class I molecules, although the level of constitutive expression varies from one cell type to the next. But not only pathogenic peptides from viruses are presented by MHC class I molecules, also self-antigens like tumor antigens are presented by them. MHC class I molecules bind peptides from proteins degraded in the cytosol and transported in the endoplasmic reticulum. The CD8+ T cells that recognize MHC class I: peptide complexes at the surface of infected cells are specialized to kill any cells displaying foreign peptides and so rid the body of cells infected with viruses and other cytosolic pathogens. The main function of CD4+ T cells (CD4+ helper T cells) that recognize MHC class II molecules is to activate other effector cells of the immune system. Thus MHC class II molecules are normally found on B lymphocytes, dendritic cells, and macrophages, cells that participate in immune responses, but not on other tissue cells. Macrophages, for example, are activated to kill the intravesicular pathogens they harbour, and B cells to secrete immunoglobulins against foreign molecules. MHC class II molecules are prevented from binding to peptides in the endoplasmic reticulum and thus MHC class II molecules bind peptides from proteins which are degraded in endosomes. They can capture peptides from pathogens that have entered the vesicular system of macrophages, or from antigens internalized by immature dendritic cells or the immunoglobulin receptors of B cells. Pathogens that accumulate in large numbers inside macrophage and dendritic cell vesicles tend to stimulate the differentiation of Th1 cells, whereas extracellular antigens tend to stimulate the production of Th2 cells. Th1 cells activate the microbicidal properties of macrophages and induce B cells to make IgG antibodies that are very effective of opsonising extracellular pathogens for ingestion by phagocytic cells, whereas Th2 cells initiate the humoral response by activating naïve B cells to secrete IgM, and induce the production of weakly opsonising antibodies such as IgG1 and IgG3 (mouse) and IgG2 and IgG4 (human) as well as IgA and IgE (mouse and human).

[0026] Epitope (also called “antigen determinant”): T cell epitopes may comprise fragments preferably having a length of about 6 to about 20 or even more amino acids, e.g. fragments as processed and presented by MHC class I molecules, preferably having a length of about 8 to about 10 amino acids, e.g. 8, 9, or 10, (or even 11, or 12 amino acids), or fragments as processed and presented by MHC class II molecules, preferably having a length of about 13 or more amino acids, e.g. 13, 14, 15, 16, 17, 18, 19, 20 or even more amino acids, wherein these fragments may be selected from any part of the amino acid sequence. These fragments are typically recognized by T cells in form of a complex consisting of the peptide fragment and an MHC molecule. B cell epitopes are typically fragments located on the outer surface of (native) protein or peptide antigens.

[0027] Vaccine: A vaccine is typically understood to be a composition comprising a compound derived from an antigenic substance, which is preferably derived from the causative agent of a disease, wherein the compound is used to provide immunity against one or several diseases. In the context of the present invention, the term “vaccine” may preferably also refer to a (synthetic/artificial) compound, which is not derived from an antigenic substance from the causative agent of a disease, and wherein the compound is used to provide immunity against one or several diseases. For example, the term “vaccine” as used herein may refer to a composition comprising as an active ingredient a (synthetic/artificial) compound, such as an (artificial) nucleic acid molecule, peptide or protein (which are preferably not derived from an antigenic substance derived from the causative agent of a disease), wherein said compound induces an immune response, preferably an innate immune response. In this context, a vaccine may comprise as an active ingredient a (synthetic/artificial) compound that preferably acts as an adjuvant and/or an immune modulator. In this context, the term “immune modulator” refers to a compound, which enhances or inhibits an immune reaction, for instance by specific interference with a signalling pathway in certain immune cells. In the meaning of the present invention, a vaccine may thus stimulate the body's adaptive and/or innate immune system in order to provide an immune response, for example an immune response against a tumor (cell).

[0028] Antigen-providing mRNA: An antigen-providing mRNA may typically be an mRNA, having at least one open reading frame that can be translated by a cell or an organism provided with that mRNA. The product of this translation is a peptide or protein that may act as an antigen, preferably as an immunogen. The product may also be a fusion protein composed of more than one immunogen, e.g. a fusion protein that consist of two or more epitopes, peptides or proteins, wherein the epitopes, peptides or proteins may be linked by linker sequences.

[0029] Bi-/multicistronic mRNA: An bi-/multicistronic mRNA typically may have two (bicistronic) or more (multicistronic) coding sequences (cds) (also often referred to as open reading frames (ORF)). A coding sequence/an open reading frame in this context is a sequence of several nucleotide triplets (codons) that can be translated into a peptide or protein. Translation of such an mRNA yields two (bicistronic) or more (multicistronic) distinct translation products (provided the coding sequences/ORFs are not identical). For expression in eukaryotes such mRNAs may for example comprise an internal ribosomal entry site (IRES) sequence.

[0030] 5′-CAP-Structure: A 5′-CAP is typically a modified nucleotide (CAP analogue), particularly a guanine nucleotide, added to the 5′ end of an mRNA molecule. Preferably, the 5′-CAP is added using a 5′-5′-triphosphate linkage (also named m7GpppN). Further examples of 5′-CAP structures include glyceryl, inverted deoxy abasic residue (moiety), 4′,5′ methylene nucleotide, 1-(beta-D-erythrofuranosyl) nucleotide, 4′-thio nucleotide, carbocyclic nucleotide, 1,5-anhydrohexitol nucleotide, L-nucleotides, alpha-nucleotide, modified base nucleotide, threo-pentofuranosyl nucleotide, acyclic 3′,4′-seco nucleotide, acyclic 3,4-dihydroxybutyl nucleotide, acyclic 3,5 dihydroxypentyl nucleotide, 3′-3′-inverted nucleotide moiety, 3′-3′-inverted abasic moiety, 3′-2′-inverted nucleotide moiety, 3′-2′-inverted abasic moiety, 1,4-butanediol phosphate, 3′-phosphoramidate, hexylphosphate, aminohexyl phosphate, 3′-phosphate, 3′phosphorothioate, phosphorodithioate, or bridging or non-bridging methylphosphonate moiety. These modified 5′-CAP structures may be used in the context of the present invention to modify the mRNA sequence of the inventive composition. Further modified 5′-CAP structures which may be used in the context of the present invention are CAP1 (additional methylation of the ribose of the adjacent nucleotide of m7GpppN), CAP2 (additional methylation of the ribose of the 2nd nucleotide downstream of the m7GpppN), CAP3 (additional methylation of the ribose of the 3rd nucleotide downstream of the m7GpppN), CAP4 (additional methylation of the ribose of the 4th nucleotide downstream of the m7GpppN), ARCA (anti-reverse CAP analogue), modified ARCA (e.g. phosphothioate modified ARCA), inosine, N1-methyl-guanosine, 2′-fluoro-guanosine, 7-deaza-guanosine, 8-oxo-guanosine, 2-amino-guanosine, LNA-guanosine, and 2-azido-guanosine.

[0031] In the context of the present invention, a 5′ cap structure may also be formed in chemical RNA synthesis or RNA in vitro transcription (co-transcriptional capping) using cap analogues, or a cap structure may be formed in vitro using capping enzymes (e.g., commercially available capping kits)

[0032] Cap analogue: A cap analogue refers to a non-polymerizable di-nucleotide that has cap functionality in that it facilitates translation or localization, and/or prevents degradation of the RNA molecule when incorporated at the 5′ end of the RNA molecule. Non-polymerizable means that the cap analogue will be incorporated only at the 5′terminus because it does not have a 5′ triphosphate and therefore cannot be extended in the 3′ direction by a template-dependent RNA polymerase.

[0033] Cap analogues include, but are not limited to, a chemical structure selected from the group consisting of m7GpppG, m7GpppA, m7GpppC; unmethylated cap analogues (e.g., GpppG); dimethylated cap analogue (e.g., m2,7GpppG), trimethylated cap analogue (e.g., m2,2,7GpppG), dimethylated symmetrical cap analogues (e.g., m7Gpppm7G), or anti reverse cap analogues (e.g., ARCA; m7,2′OmeGpppG, m7,2′dGpppG, m7,3′OmeGpppG, m7,3′dGpppG and their tetraphosphate derivatives) (Stepinski et al., 2001. RNA 7(10):1486-95).

[0034] Further cap analogues have been described previously (U.S. Pat. No. 7,074,596, WO 2008/016473, WO 2008/157688, WO 2009/149253, WO 2011/015347, and WO 2013/059475). The synthesis of N⁷-(4-chlorophenoxyethyl) substituted dinucleotide cap analogues has been described recently (Kore et al. (2013) Bioorg. Med. Chem. 21(15): 4570-4).

[0035] Fragments of proteins: “Fragments” of proteins or peptides in the context of the present invention may, typically, comprise a sequence of a protein or peptide as defined herein, which is, with regard to its amino acid sequence (or its encoded nucleic acid molecule), N-terminally and/or C-terminally truncated compared to the amino acid sequence of the original (native) protein (or its encoded nucleic acid molecule). Such truncation may thus occur either on the amino acid level or correspondingly on the nucleic acid level. A sequence identity with respect to such a fragment as defined herein may therefore preferably refer to the entire protein or peptide as defined herein or to the entire (coding) nucleic acid molecule of such a protein or peptide. In the context of antigens such fragment may have a length of about 6 to about 20 or even more amino acids, e.g. fragments as processed and presented by MHC class I molecules, preferably having a length of about 8 to about 10 amino acids, e.g. 8, 9, or 10, (or even 6, 7, 11, or 12 amino acids), or fragments as processed and presented by MHC class II molecules, preferably having a length of about 13 or more amino acids, e.g. 13, 14, 15, 16, 17, 18, 19, 20 or even more amino acids, wherein these fragments may be selected from any part of the amino acid sequence. These fragments are typically recognized by T-cells in form of a complex consisting of the peptide fragment and an MHC molecule, i.e. the fragments are typically not recognized in their native form. Fragments of proteins or peptides (e.g. in the context of antigens) may comprise at least one epitope of those proteins or peptides. Furthermore also domains of a protein, like the extracellular domain, the intracellular domain or the transmembrane domain and shortened or truncated versions of a protein may be understood to comprise a fragment of a protein. Preferably, a fragment of a protein comprises a functional fragment of the protein, which means that the fragment exerts the same effect or functionality as the whole protein it is derived from. More preferably, a “fragment” as used herein is at least 50%, 60%, 70%, 75%, 80%, 81%, 82%, 83%, 84%, 85%, 86%, 87%, 88%, 89%, 90%, 91%, 92%, 93%, 94%, 95%, 96%, 97%, 98%, or 99% identical to the peptide or protein, from which it is derived.

[0036] Variants of proteins: “Variants” of proteins or peptides as defined in the context of the present invention may be generated, having an amino acid sequence which differs from the original sequence in one or more mutation(s), such as one or more substituted, inserted and/or deleted amino acid(s). Preferably, these fragments and/or variants have the same biological function or specific activity compared to the full-length native protein, e.g. its specific antigenic property. “Variants” of proteins or peptides as defined in the context of the present invention may comprise conservative amino acid substitution(s) compared to their native, i.e. non-mutated physiological, sequence. Those amino acid sequences as well as their encoding nucleotide sequences in particular fall under the term variants as defined herein. Substitutions in which amino acids, which originate from the same class, are exchanged for one another are called conservative substitutions. In particular, these are amino acids having aliphatic side chains, positively or negatively charged side chains, aromatic groups in the side chains or amino acids, the side chains of which can enter into hydrogen bridges, e.g. side chains which have a hydroxyl function. This means that e.g. an amino acid having a polar side chain is replaced by another amino acid having a likewise polar side chain, or, for example, an amino acid characterized by a hydrophobic side chain is substituted by another amino acid having a likewise hydrophobic side chain (e.g. serine (threonine) by threonine (serine) or leucine (isoleucine) by isoleucine (leucine)). Insertions and substitutions are possible, in particular, at those sequence positions which cause no modification to the three-dimensional structure or do not affect the binding region. Modifications to a three-dimensional structure by insertion(s) or deletion(s) can easily be determined e.g. using CD spectra (circular dichroism spectra) (Urry, 1985, Absorption, Circular Dichroism and ORD of Polypeptides, in: Modern Physical Methods in Biochemistry, Neuberger et al. (ed.), Elsevier, Amsterdam).

[0037] A “variant” of a protein or peptide may have at least 70%, 75%, 80%, 85%, 90%, 95%, 98% or 99% amino acid identity over a stretch of 10, 20, 30, 50, 75 or 100 amino acids of such protein or peptide. Alternatively, More preferably, a “variant” as used herein is at least 50%, 60%, 70%, 75%, 80%, 81%, 82%, 83%, 84%, 85%, 86%, 87%, 88%, 89%, 90%, 91%, 92%, 93%, 94%, 95%, 96%, 97%, 98%, or 99% identical to the peptide or protein, from which it is derived.

[0038] Furthermore, variants of proteins or peptides as defined herein, which may be encoded by a nucleic acid molecule, may also comprise those sequences, wherein nucleotides of the encoding nucleic acid sequence are exchanged according to the degeneration of the genetic code, without leading to an alteration of the respective amino acid sequence of the protein or peptide, i.e. the amino acid sequence or at least part thereof may not differ from the original sequence within the above meaning.

[0039] Preferably, a variant of a protein comprises a functional variant of the protein, which means that the variant exerts the same effect or functionality as the protein it is derived from.

[0040] Identity of a sequence: In order to determine the percentage to which two sequences are identical, e.g. nucleic acid sequences or amino acid sequences as defined herein, preferably the amino acid sequences encoded by a nucleic acid sequence of the polymeric carrier as defined herein or the amino acid sequences themselves, the sequences can be aligned in order to be subsequently compared to one another. Therefore, e.g. a position of a first sequence may be compared with the corresponding position of the second sequence. If a position in the first sequence is occupied by the same component (residue) as is the case at a position in the second sequence, the two sequences are identical at this position. If this is not the case, the sequences differ at this position. If insertions occur in the second sequence in comparison to the first sequence, gaps can be inserted into the first sequence to allow a further alignment. If deletions occur in the second sequence in comparison to the first sequence, gaps can be inserted into the second sequence to allow a further alignment. The percentage to which two sequences are identical is then a function of the number of identical positions divided by the total number of positions including those positions which are only occupied in one sequence. The percentage to which two sequences are identical can be determined using a mathematical algorithm. A preferred, but not limiting, example of a mathematical algorithm which can be used is the algorithm of Karlin et al. (1993), PNAS USA, 90:5873-5877 or Altschul et al. (1997), Nucleic Acids Res., 25:3389-3402. Such an algorithm is integrated in the BLAST program. Sequences which are identical to the sequences of the present invention to a certain extent can be identified by this program.

[0041] Monocistronic mRNA: A monocistronic mRNA may typically be an mRNA, that comprises only one coding sequence (open reading frame). A coding sequence/open reading frame in this context is a sequence of several nucleotide triplets (codons) that can be translated into a peptide or protein.

[0042] Nucleic acid: The term nucleic acid means any DNA or RNA molecule and is used synonymous with polynucleotide. Wherever herein reference is made to a nucleic acid or nucleic acid sequence encoding a particular protein and/or peptide, said nucleic acid or nucleic acid sequence, respectively, preferably also comprises regulatory sequences allowing in a suitable host, e.g. a human being, its expression, i.e. transcription and/or translation of the nucleic acid sequence encoding the particular protein or peptide.

[0043] Peptide: A peptide is a polymer of amino acid monomers. Usually the monomers are linked by peptide bonds. The term “peptide” does not limit the length of the polymer chain of amino acids. In some embodiments of the present invention a peptide may for example contain less than 50 monomer units. Longer peptides are also called polypeptides, typically having 50 to 600 monomeric units, more specifically 50 to 300 monomeric units.

[0044] Pharmaceutically effective amount: A pharmaceutically effective amount in the context of the invention is typically understood to be an amount that is sufficient to induce an immune response or to trigger the desired therapeutical effect.

[0045] Protein: A protein typically consists of one or more peptides and/or polypeptides folded into 3-dimensional form, facilitating a biological function.

[0046] Poly(C) sequence: A poly(C) sequence is typically a long sequence of cytosine nucleotides, typically about 10 to about 200 cytosine nucleotides, preferably about 10 to about 100 cytosine nucleotides, more preferably about 10 to about 70 cytosine nucleotides or even more, preferably about 20 to about 50, or even about 20 to about 30 cytosine nucleotides. A poly(C) sequence may preferably be located 3′ of the coding region comprised by a nucleic acid.

[0047] Poly(A) tail: A poly(A) tail also called “3′-poly(A) tail” or “poly(A) sequence” is typically a long homopolymeric sequence of adenosine nucleotides of up to about 400 adenosine nucleotides, e.g. from about 25 to about 400, preferably from about 50 to about 400, more preferably from about 50 to about 300, even more preferably from about 50 to about 250, most preferably from about 60 to about 250 adenosine nucleotides, added to the 3′ end of an mRNA. In the context of the present invention, the poly(A) tail of an mRNA is preferably derived from a DNA template by RNA in vitro transcription. Alternatively, the poly(A) sequence may also be obtained in vitro by common methods of chemical synthesis without being necessarily transcribed from a DNA-progenitor. Moreover, poly(A) sequences, or poly(A) tails may be generated by enzymatic polyadenylation of the RNA.

[0048] Stabilized nucleic acid: A stabilized nucleic acid, typically, exhibits a modification increasing resistance to in vivo degradation (e.g. degradation by an exo- or endo-nuclease) and/or ex vivo degradation (e.g. by the manufacturing process prior to vaccine administration, e.g. in the course of the preparation of the vaccine solution to be administered). Stabilization of RNA can, e.g., be achieved by providing a 5′-CAP-Structure, a poly(A) tail, or any other UTR-modification. It can also be achieved by backbone-modification or modification of the G/C-content or the C-content of the nucleic acid. Various other methods are known in the art and conceivable in the context of the invention.

[0049] Carrier/polymeric carrier: A carrier in the context of the invention may typically be a compound that facilitates transport and/or complexation of another compound. Said carrier may form a complex with said other compound. A polymeric carrier is a carrier that is formed of a polymer.

[0050] Cationic component: The term “cationic component” typically refers to a charged molecule, which is positively charged (cation) at a pH value of typically about 1 to 9, preferably of a pH value of or below 9 (e.g. 5 to 9), of or below 8 (e.g. 5 to 8), of or below 7 (e.g. 5 to 7), most preferably at physiological pH values, e.g. about 7.3 to 7.4. Accordingly, a cationic peptide, protein or polymer according to the present invention is positively charged under physiological conditions, particularly under physiological salt conditions of the cell in vivo. A cationic peptide or protein preferably contains a larger number of cationic amino acids, e.g. a larger number of Arg, His, Lys or Orn than other amino acid residues (in particular more cationic amino acids than anionic amino acid residues like Asp or Glu) or contains blocks predominantly formed by cationic amino acid residues. The definition “cationic” may also refer to “polycationic” components.

[0051] Vehicle: A vehicle is an agent, e.g. a carrier, that may typically be used within a pharmaceutical composition or vaccine for facilitating administering of the components of the pharmaceutical composition or vaccine to an individual.

[0052] 3′-untranslated region (3′-UTR): A 3′-UTR is typically the part of an mRNA which is located between the protein coding region (i.e. the open reading frame) and the poly(A) sequence of the mRNA. A 3′-UTR of the mRNA is not translated into an amino acid sequence. The 3′-UTR sequence is generally encoded by the gene which is transcribed into the respective mRNA during the gene expression process. The genomic sequence is first transcribed into pre-mature mRNA, which comprises optional introns. The pre-mature mRNA is then further processed into mature mRNA in a maturation process. This maturation process comprises the steps of 5′-capping, splicing the pre-mature mRNA to excise optional introns and modifications of the 3′-end, such as polyadenylation of the 3′-end of the pre-mature mRNA and optional endo- or exonuclease cleavages etc. In the context of the present invention, a 3′-UTR corresponds to the sequence of a mature mRNA which is located 3′ to the stop codon of the protein coding region, preferably immediately 3′ to the stop codon of the protein coding region, and which extends to the 5′-side of the poly(A) sequence, preferably to the nucleotide immediately 5′ to the poly(A) sequence. The term “corresponds to” means that the 3′-UTR sequence may be an RNA sequence, such as in the mRNA sequence used for defining the 3′-UTR sequence, or a DNA sequence which corresponds to such RNA sequence. In the context of the present invention, the term “a 3′-UTR of a gene”, such as “a 3′-UTR of an albumin gene”, is the sequence which corresponds to the 3′-UTR of the mature mRNA derived from this gene, i.e. the mRNA obtained by transcription of the gene and maturation of the pre-mature mRNA. The term “3′-UTR of a gene” encompasses the DNA sequence and the RNA sequence of the 3′-UTR.

[0053] 5′-untranslated region (5′-UTR): A 5′-UTR is typically understood to be a particular section of messenger RNA (mRNA). It is located 5′ of the open reading frame of the mRNA. Typically, the 5′-UTR starts with the transcriptional start site and ends one nucleotide before the start codon of the open reading frame. The 5′-UTR may comprise elements for controlling gene expression, also called regulatory elements. Such regulatory elements may be, for example, ribosomal binding sites or a 5′-Terminal Oligopyrimidine Tract. The 5′-UTR may be posttranscriptionally modified, for example by addition of a 5′-CAP. In the context of the present invention, a 5′UTR corresponds to the sequence of a mature mRNA which is located between the 5′-CAP and the start codon. Preferably, the 5′-UTR corresponds to the sequence which extends from a nucleotide located 3′ to the 5′-CAP, preferably from the nucleotide located immediately 3′ to the 5′-CAP, to a nucleotide located 5′ to the start codon of the protein coding region, preferably to the nucleotide located immediately 5′ to the start codon of the protein coding region. The nucleotide located immediately 3′ to the 5′-CAP of a mature mRNA typically corresponds to the transcriptional start site. The term “corresponds to” means that the 5′-UTR sequence may be an RNA sequence, such as in the mRNA sequence used for defining the 5′-UTR sequence, or a DNA sequence which corresponds to such RNA sequence. In the context of the present invention, the term “a 5′-UTR of a gene”, such as “a 5′-UTR of a TOP gene”, is the sequence which corresponds to the 5′-UTR of the mature mRNA derived from this gene, i.e. the mRNA obtained by transcription of the gene and maturation of the pre-mature mRNA. The term “5′-UTR of a gene” encompasses the DNA sequence and the RNA sequence of the 5′-UTR.

[0054] 5′ Terminal Oligopyrimidine Tract (TOP): The 5′ terminal oligopyrimidine tract (TOP) is typically a stretch of pyrimidine nucleotides located at the 5′ terminal region of a nucleic acid molecule, such as the 5′ terminal region of certain mRNA molecules or the 5′ terminal region of a functional entity, e.g. the transcribed region, of certain genes. The sequence starts with a cytidine, which usually corresponds to the transcriptional start site, and is followed by a stretch of usually about 3 to 30 pyrimidine nucleotides. For example, the TOP may comprise 3, 4, 5, 6, 7, 8, 9, 10, 11, 12, 13, 14, 15, 16, 17, 18, 19, 20, 21, 22, 23, 24, 25, 26, 27, 28, 29, 30 or even more nucleotides. The pyrimidine stretch and thus the 5′ TOP ends one nucleotide 5′ to the first purine nucleotide located downstream of the TOP. mRNA that contains a 5′ terminal oligopyrimidine tract is often referred to as TOP mRNA. Accordingly, genes that provide such messenger RNAs are referred to as TOP genes. TOP sequences have, for example, been found in genes and mRNAs encoding peptide elongation factors and ribosomal proteins.

[0055] TOP motif: In the context of the present invention, a TOP motif is a nucleic acid sequence which corresponds to a 5′ TOP as defined above. Thus, a TOP motif in the context of the present invention is preferably a stretch of pyrimidine nucleotides having a length of 3-30 nucleotides. Preferably, the TOP-motif consists of at least 3 pyrimidine nucleotides, preferably at least 4 pyrimidine nucleotides, preferably at least 5 pyrimidine nucleotides, more preferably at least 6 nucleotides, more preferably at least 7 nucleotides, most preferably at least 8 pyrimidine nucleotides, wherein the stretch of pyrimidine nucleotides preferably starts at its 5′ end with a cytosine nucleotide. In TOP genes and TOP mRNAs, the TOP-motif preferably starts at its 5′ end with the transcriptional start site and ends one nucleotide 5′ to the first purine residue in said gene or mRNA. A TOP motif in the sense of the present invention is preferably located at the 5′end of a sequence which represents a 5′-UTR or at the 5′ end of a sequence which codes for a 5′-UTR. Thus, preferably, a stretch of 3 or more pyrimidine nucleotides is called “TOP motif” in the sense of the present invention if this stretch is located at the 5′ end of a respective sequence, such as the inventive mRNA, the 5′-UTR element of the inventive mRNA, or the nucleic acid sequence which is derived from the 5′-UTR of a TOP gene as described herein. In other words, a stretch of 3 or more pyrimidine nucleotides which is not located at the 5′-end of a 5′-UTR or a 5′-UTR element but anywhere within a 5′-UTR or a 5′-UTR element is preferably not referred to as “TOP motif”.

[0056] TOP gene: TOP genes are typically characterised by the presence of a 5′ terminal oligopyrimidine tract. Furthermore, most TOP genes are characterized by a growth-associated translational regulation. However, also TOP genes with a tissue specific translational regulation are known. As defined above, the 5′-UTR of a TOP gene corresponds to the sequence of a 5′-UTR of a mature mRNA derived from a TOP gene, which preferably extends from the nucleotide located 3′ to the 5′-CAP to the nucleotide located 5′ to the start codon. A 5′-UTR of a TOP gene typically does not comprise any start codons, preferably no upstream AUGs (uAUGs) or upstream open reading frames (uORFs). Therein, upstream AUGs and upstream open reading frames are typically understood to be AUGs and open reading frames that occur 5′ of the start codon (AUG) of the open reading frame that should be translated. The 5′-UTRs of TOP genes are generally rather short. The lengths of 5′-UTRs of TOP genes may vary between 20 nucleotides up to 500 nucleotides, and are typically less than about 200 nucleotides, preferably less than about 150 nucleotides, more preferably less than about 100 nucleotides. Exemplary 5′-UTRs of TOP genes in the sense of the present invention are the nucleic acid sequences extending from the nucleotide at position 5 to the nucleotide located immediately 5′ to the start codon (e.g. the ATG) in the sequences according to SEQ ID NOs. 1-1363, SEQ ID NO: 1395, SEQ ID NO: 1421 and SEQ ID NO: 1422 of the international patent application WO2013/143700 or homologs or variants thereof, whose disclosure is incorporated herewith by reference. In this context a particularly preferred fragment of a 5′UTR of a TOP gene is a 5′-UTR of a TOP gene lacking the 5′ TOP motif. The term ‘5′UTR of a TOP gene’ preferably refers to the 5′-UTR of a naturally occurring TOP gene.

[0057] Chemical synthesis of RNA: Chemical synthesis of relatively short fragments of oligonucleotides with defined chemical structure provides a rapid and inexpensive access to custom-made oligonucleotides of any desired sequence. Whereas enzymes synthesize DNA and RNA only in the 5′ to 3′ direction, chemical oligonucleotide synthesis does not have this limitation, although it is most often carried out in the opposite, i.e. the 3′ to 5′ direction. Currently, the process is implemented as solid-phase synthesis using the phosphoramidite method and phosphoramidite building blocks derived from protected nucleosides (A, C, G, and U), or chemically modified nucleosides.

[0058] To obtain the desired oligonucleotide, the building blocks are sequentially coupled to the growing oligonucleotide chain on a solid phase in the order required by the sequence of the product in a fully automated process. Upon the completion of the chain assembly, the product is released from the solid phase to the solution, deprotected, and collected. The occurrence of side reactions sets practical limits for the length of synthetic oligonucleotides (up to about 200 nucleotide residues), because the number of errors increases with the length of the oligonucleotide being synthesized. Products are often isolated by HPLC to obtain the desired oligonucleotides in high purity.

[0059] Chemically synthesized oligonucleotides find a variety of applications in molecular biology and medicine. They are most commonly used as antisense oligonucleotides, small interfering RNA, primers for DNA sequencing and amplification, probes for detecting complementary DNA or RNA via molecular hybridization, tools for the targeted introduction of mutations and restriction sites, and for the synthesis of artificial genes.

[0060] RNA in vitro transcription: The terms “RNA in vitro transcription” or “in vitro transcription” relate to a process wherein RNA is synthesized in a cell-free system (in vitro). DNA, particularly plasmid DNA, is used as template for the generation of RNA transcripts. RNA may be obtained by DNA-dependent in vitro transcription of an appropriate DNA template, which according to the present invention is preferably a linearized plasmid DNA template. The promoter for controlling in vitro transcription can be any promoter for any DNA-dependent RNA polymerase. Particular examples of DNA-dependent RNA polymerases are the T7, T3, and SP6 RNA polymerases. A DNA template for in vitro RNA transcription may be obtained by cloning of a nucleic acid, in particular cDNA corresponding to the respective RNA to be in vitro transcribed, and introducing it into an appropriate vector for in vitro transcription, for example into plasmid DNA. In a preferred embodiment of the present invention the DNA template is linearized with a suitable restriction enzyme, before it is transcribed in vitro. The cDNA may be obtained by reverse transcription of mRNA or chemical synthesis. Moreover, the DNA template for in vitro RNA synthesis may also be obtained by gene synthesis.

[0061] Methods for in vitro transcription are known in the art (see, e.g., Geall et al. (2013) Semin. Immunol. 25(2): 152-159; Brunelle et al. (2013) Methods Enzymol. 530:101-14). Reagents used in said method typically include:
[0062] 1) a linearized DNA template with a promoter sequence that has a high binding affinity for its respective RNA polymerase such as bacteriophage-encoded RNA polymerases;
[0063] 2) ribonucleoside triphosphates (NTPs) for the four bases (adenine, cytosine, guanine and uracil);
[0064] 3) optionally a cap analogue as defined above (e.g. m7G(5′)ppp(5′)G (m7G));
[0065] 4) a DNA-dependent RNA polymerase capable of binding to the promoter sequence within the linearized DNA template (e.g. T7, T3 or SP6 RNA polymerase);
[0066] 5) optionally a ribonuclease (RNase) inhibitor to inactivate any contaminating RNase;
[0067] 6) optionally a pyrophosphatase to degrade pyrophosphate, which may inhibit transcription;
[0068] 7) MgCl₂, which supplies Mg²⁺ ions as a co-factor for the polymerase;
[0069] 8) a buffer to maintain a suitable pH value, which can also contain antioxidants (e.g. DTT), and/or polyamines such as spermidine at optimal concentrations.

[0070] RNA, mRNA: RNA is the usual abbreviation for ribonucleic acid. It is a nucleic acid molecule, i.e. a polymer consisting of nucleotide monomers. These nucleotides are usually adenosine monophosphate (AMP), uridine monophosphate (UMP), guanosine monophosphate (GMP) and cytidine monophosphate (CMP) monomers or analogues thereof, which are connected to each other along a so-called backbone. The backbone is formed by phosphodiester bonds between the sugar, i.e. ribose, of a first and a phosphate moiety of a second, adjacent monomer. The specific order of the monomers, i.e. the order of the bases linked to the sugar/phosphate-backbone, is called the RNA sequence. Usually RNA may be obtainable by transcription of a DNA sequence, e.g., inside a cell. In eukaryotic cells, transcription is typically performed inside the nucleus or the mitochondria. In vivo, transcription of DNA usually results in the so-called premature RNA (also called pre-mRNA, precursor mRNA or heterogeneous nuclear RNA) which has to be processed into so-called messenger RNA, usually abbreviated as mRNA. Processing of the premature RNA, e.g. in eukaryotic organisms, comprises a variety of different posttranscriptional modifications such as splicing, 5′-capping, polyadenylation, export from the nucleus or the mitochondria and the like. The sum of these processes is also called maturation of RNA. The mature messenger RNA usually provides the nucleotide sequence that may be translated into an amino acid sequence of a particular peptide or protein. Typically, a mature mRNA comprises a 5′-cap, optionally a 5′UTR, an open reading frame, optionally a 3′UTR and a poly(A) tail.

[0071] In addition to messenger RNA, several non-coding types of RNA exist which may be involved in regulation of transcription and/or translation, and immunostimulation. Within the present invention the term “RNA” further encompasses any type of single stranded (ssRNA) or double stranded RNA (dsRNA) molecule known in the art, such as viral RNA, retroviral RNA and replicon RNA, small interfering RNA (siRNA), antisense RNA (asRNA), circular RNA (circRNA), ribozymes, aptamers, riboswitches, immunostimulating/immunostimulatory RNA, transfer RNA (tRNA), ribosomal RNA (rRNA), small nuclear RNA (snRNA), small nucleolar RNA (snoRNA), microRNA (miRNA), and Piwi-interacting RNA (piRNA).

[0072] Fragment of a nucleic acid sequence, particularly an RNA: A fragment of a nucleic acid sequence consists of a continuous stretch of nucleotides corresponding to a continuous stretch of nucleotides in the full-length nucleic acid sequence which is the basis for the nucleic acid sequence of the fragment, which represents at least 20%, preferably at least 30%, more preferably at least 40%, more preferably at least 50%, even more preferably at least 60%, even more preferably at least 70%, even more preferably at least 80%, even more preferably at least 80%, even more preferably at least 85%, even more preferably at least 90%, even more preferably at least 95%, and most preferably at least 98% or 99% of the full-length nucleic acid sequence. Such a fragment, in the sense of the present invention, is preferably a functional fragment of the full-length nucleic acid sequence.

[0073] Variant of a nucleic acid sequence, particularly an RNA: A variant of a nucleic acid sequence refers to a variant of nucleic acid sequences which forms the basis of a nucleic acid sequence. For example, a variant nucleic acid sequence may exhibit one or more nucleotide deletions, insertions, additions and/or substitutions compared to the nucleic acid sequence from which the variant is derived. Preferably, a variant of a nucleic acid sequence is at least 40%, preferably at least 50%, more preferably at least 60%, more preferably at least 70%, even more preferably at least 80%, even more preferably at least 90%, most preferably at least 95% identical to the nucleic acid sequence the variant is derived from. Preferably, the variant is a functional variant. A “variant” of a nucleic acid sequence may have at least 70%, 75%, 80%, 85%, 90%, 95%, 98% or 99% k nucleotide identity over a stretch of 10, 20, 30, 50, 75 or 100 nucleotide of such nucleic acid sequence.

[0074] Intratumoral administration/application: The term, intratumoral administration/application” refers to the direct delivery of a pharmaceutical composition into or adjacent to a tumor or cancer and/or immediate vicinity of a tumor or cancer. In the context of the present invention the term “intratumoral administration/application” thus typically also refers to locoregional or peritumoral application/administration. Multiple injections into separate regions of the tumor or cancer are also included. Furthermore, intratumoral administration/application includes delivery of a pharmaceutical composition into one or more metastases. Methods for intratumoral delivery of drugs are known in the art (Brincker, 1993. Crit. Rev. Oncol. Hematol. 15(2):91-8; Celikoglu et al., 2008. Cancer Therapy 6, 545-552). For example, the pharmaceutical composition can be administered by conventional needle injection, needle-free jet injection or electroporation or combinations thereof into the tumor or cancer tissue. The pharmaceutical composition can be injected directly into the tumor or cancer (tissue) with great precision by imaging-guided injection, preferably using an imaging technique, such as computer tomograpy, ultrasound, gamma camera imaging, positron emission tomography, or magnetic resonance tumor imaging. Further procedures are selected from the group including, but not limited to, direct intratumoral injection by endoscopy, bronchoscopy, cystoscopy, colonoscopy, laparoscope and catheterization. In addition the pharmaceutical composition can be injected locoregionally or peritumorally by the same methods. Tumor or cancer tissue includes metastases of the primary tumor, e.g. to lymph nodes, skin, soft tissues, bone, visceral organs or other organs of the body.

[0075] Decoy receptors: Decoy receptors recognize certain growth factors or cytokines with high affinity and specificity, but are structurally incapable of signaling or presenting the agonist to signaling receptor complexes. They act as a molecular trap for the agonist and for signaling receptor components. A decoy receptor, or sink receptor, is a receptor that binds a ligand, inhibiting it from binding to its normal receptor. For instance, the receptor VEGFR-1 can prevent vascular endothelial growth factor (VEGF) from binding to the VEGFR-2.

[0076] Dominant negative receptors: Dominant negative receptors are variants of the particular receptor comprising dominant-negative (DN) mutations as leading to mutant polypeptides that disrupt the activity of the wild type receptor when overexpressed. In a first aspect, the invention relates to an immunostimulatory RNA (isRNA) for use in the treatment or prophylaxis of tumor and/or cancer diseases. In particular, an isRNA is provided for use in the treatment or prophylaxis of tumor and/or cancer diseases, wherein the isRNA is administered intratumorally.

### SUMMARY OF THE INVENTION

[0077] The inventors found that the administration, in particular the intratumoral administration, of an isRNA as described herein may be employed for treatment or prophylaxis of tumor or cancer diseases and related disorders. It has been shown that treatment of tumor or cancer diseases with isRNA is surprisingly effective, in particular if administered intratumorally, in decreasing tumor size. Moreover, the application of isRNA according to the invention was able to increase survival in animal models and to protect surviving animals from rechallenge with the same tumor although treatment with the pharmaceutical composition had been stopped upon rechallenge. This finding is in line with generation of long lasting immunologic memory to the tumor. This could not have been expected as the isRNA does not induce an adaptive immune response directly.

[0078] As used herein, the terms “tumor”, “cancer” or “cancer disease” refer to a malignant disease, which is preferably selected from the group consisting of Adenocystic carcinoma (Adenoid cystic carcinoma), Adrenocortical carcinoma, AIDS-related cancers, AIDS-related lymphoma, Anal cancer, Appendix cancer, Astrocytoma, Basal cell carcinoma, Bile duct cancer, Bladder cancer, Bone cancer, Osteosarcoma/Malignant fibrous histiocytoma, Brainstem glioma, Brain tumor, cerebellar astrocytoma, cerebral astrocytoma/malignant glioma, ependymoma, medulloblastoma, supratentorial primitive neuroectodermal tumors, visual pathway and hypothalamic glioma, Breast cancer, Bronchial adenomas/carcinoids, Burkitt lymphoma, childhood Carcinoid tumor, gastrointestinal Carcinoid tumor, Carcinoma of unknown primary, primary Central nervous system lymphoma, childhood Cerebellar astrocytoma, childhood Cerebral astrocytoma/Malignant glioma, Cervical cancer, Childhood cancers, Chronic lymphocytic leukemia, Colon Cancer, Cutaneous T-cell lymphoma including Mycosis Fungoides and Sezary Syndrome, Desmoplastic small round cell tumor, Endometrial cancer, Ependymoma, Esophageal cancer, Ewing's sarcoma in the Ewing family of tumors, Childhood Extracranial germ cell tumor, Extragonadal Germ cell tumor, Extrahepatic bile duct cancer, Intraocular melanoma, Retinoblastoma, Gallbladder cancer, Gastric (Stomach) cancer, Gastrointestinal Carcinoid Tumor, Gastrointestinal stromal tumor (GIST), extracranial, extragonadal, or ovarian Germ cell tumor, Gestational trophoblastic tumor, Glioma of the brain stem, Childhood Cerebral Astrocytoma, Childhood Visual Pathway and Hypothalamic Glioma, Gastric carcinoid, Hairy cell leukemia, Head and neck cancer, Heart cancer, Hepatocellular (liver) cancer, Hodgkin lymphoma, Human Papilloma Virus (HPV)-related cancer, Hypopharyngeal cancer, childhood Hypothalamic and visual pathway glioma, Intraocular Melanoma, Islet Cell Carcinoma (Endocrine Pancreas), Kaposi sarcoma, Kidney cancer (renal cell cancer), Laryngeal Cancer, Lip and Oral Cavity Cancer, Liposarcoma, Liver Cancer, Non-Small Cell Lung Cancer, Small Cell Lung Cancer, Lymphomas, AIDS-related Lymphoma, Burkitt Lymphoma, Hodgkin Lymphoma, Non-Hodgkin Lymphomas, Primary Central Nervous System Lymphoma, Malignant Fibrous Histiocytoma of Bone/Osteosarcoma, Childhood Medulloblastoma, Melanoma, Intraocular (Eye) Melanoma, Merkel Cell Carcinoma, Adult Malignant Mesothelioma, Childhood Mesothelioma, Head or Neck Cancer, Mouth Cancer, Childhood Multiple Endocrine Neoplasia Syndrome, Multiple Myeloma/Plasma Cell Neoplasm, Multiple Myeloma (Cancer of the Bone-Marrow), Nasal cavity and paranasal sinus cancer, Nasopharyngeal carcinoma, Neuroblastoma, Oral Cancer, Oropharyngeal cancer, Osteosarcoma/malignant fibrous histiocytoma of bone, Ovarian cancer, Ovarian epithelial cancer (Surface epithelial-stromal tumor), Ovarian germ cell tumor, Ovarian low malignant potential tumor, Pancreatic cancer, islet cell Pancreatic cancer, Paranasal sinus and nasal cavity cancer, Parathyroid cancer, Penile cancer, Pharyngeal cancer, Pheochromocytoma, Pineal astrocytoma, Pineal germinoma, childhood Pineoblastoma and supratentorial primitive neuroectodermal tumors, Pituitary adenoma, Plasma cell neoplasia/plasmocytoma/Multiple myeloma, Pleuropulmonary blastoma, Primary central nervous system lymphoma, Prostate cancer, Rectal cancer, Renal cell carcinoma (kidney cancer), Cancer of the Renal pelvis and ureter, Retinoblastoma, childhood Rhabdomyosarcoma, Salivary gland cancer, Sarcoma of the Ewing family of tumors, Kaposi Sarcoma, soft tissue Sarcoma, uterine Sarcoma, Skin cancer (nonmelanoma), Skin cancer (melanoma), Merkel cell Skin carcinoma, Small intestine cancer, Squamous cell carcinoma, metastatic Squamous neck cancer with occult primary, soft tissue sarcoma (STS), childhood Supratentorial primitive neuroectodermal tumor, Testicular cancer (seminoma and non-seminoma), Throat cancer, childhood Thymoma, Thymoma and Thymic carcinoma, Thyroid cancer, childhood Thyroid cancer, Transitional cell cancer of the renal pelvis and ureter, gestational Trophoblastic tumor, Urethral cancer, endometrial Uterine cancer, Uterine sarcoma, Vaginal cancer, childhood Visual pathway and hypothalamic glioma, Vulvar cancer, and childhood Wilms tumor (kidney cancer).

[0079] Especially preferred examples of tumors or cancers that are suitable for intratumoral, including peritumoral or locoregional administration, preferably imaging guided loco-regional administration, are prostate cancer, lung cancer, breast cancer, brain cancer, head and neck cancer including cancer of the lips, mouth, or tongue, nasopharyngal cancers or lymphoma, thyroid cancer, thymic cancer, colon cancer, stomach cancer, esophageal cancer, liver cancer, biliary cancer, pancreas cancer, ovary cancer, skin cancer, (melanoma and non-melanoma skin cancer), urinary bladder and urothel, uterus and cervix, anal cancer, bone cancers, kidney cancer, adrenal cancer, testicular cancer, cutaneous T cell lymphoma, cutaneous B cell lymphoma, plasmocytoma, other Hodgkin and non-hodgkin lymphomas with injectable, solitary lesions, adenocystic carcinoma, other salivary gland cancers, neuroendocrine tumors, vulvar cancer, sarcoma (incl. pediatric sarcoma), penile cancer lymphomas.

[0080] Preferably, a tumor or cancer disease is selected from the group consisting of breast cancer (hormone receptor positive or negative forms); melanoma, preferably advanced and/or metastatic melanoma, most preferably advanced cutaneous melanoma (cMEL); squamous cell cancer of the skin (SCC), preferably unresectable and/or advanced SCC, most preferably cutaneous squamous cell carcinoma (cSCC), or other forms of malignant skin cancer; adenocystic carcinoma (ACC), preferably advanced ACC; cutaneous T-cell lymphoma, preferably advanced cutaneous T-cell lymphoma or cutaneous T-cell lymphoma of mycosis fungoides subtype (CTCL-MF); squamous cell carcinoma of the head and neck (HNSCC), preferably advanced or locally advanced HNSCC; follicular lymphoma (FL); marginal zone lymphoma, preferably nodal marginal zone lymphoma (nMZL); mantle cell lymphoma; primary cutaneous anaplastic large cell lymphoma (PC-ALCL); vulvar carcinoma, preferably vulvar squamous cell carcinoma (VSCC); soft tissue sarcoma; breast cancer; hepatocellular carcinoma; colorectal cancer (including MSI-High CRC); neuroendocrine tumors; pancreas cancer; gastroesophageal cancer; uveal melanoma; penile cancer lymphoma; salivary gland cancer; nasopharynx cancers; lung cancer, preferably locally advanced or advanced non-small cell lung cancer or small cell lung cancer of limited or extensive disease, lung metastases of other malignancies; mesothelioma; urothelial or bladder cancer; thyroid cancer; esophageal and gastric cancer; gastric cancer, esophageal cancer, liver cancer; malignancies with liver metastases; ovarian cancer; cervix cancer; renal cancer; adrenal malignancies, soft-tissue sarcoma, hematological malignancies with injectable lesions like cutaneous T-cell lymphoma; solitary or multiple myeloma; Hodgkin's disease; Non-Hodgkin Lymphoma, preferably indolent cutaneously accesible Non-Hodgkin Lymphoma (CTCL) or non-Hodgkin lymphoma with injectable lesions; sarcoma including its various subtypes; glioma grade I-IV; colorectal, rectal or anal cancer. In particular, the terms “tumor”, “cancer” or “cancer disease” as used herein refer to basal cell carcinoma; or melanoma, preferably advanced and/or metastatic melanoma; squamous cell cancer (SCC), preferably SCC of the skin, more preferably unresectable and/or advanced SCC of the skin; or squamous cell carcinoma of the head and neck (HNSCC), preferably advanced and/or platinum-refractory and/or immunotherapy-refractory HNSCC; or vulvar carcinoma or vulvar squamous cell carcinoma (VSCC), preferably unresectable and/or advanced VSCC, more preferably advanced and/or platinum-refractory and/or immunotherapy-refractory VSCC; or adenocystic carcinoma (ACC), preferably advanced ACC; or cutaneous T-cell lymphoma, preferably advanced cutaneous T-cell lymphoma or cutaneous T-cell lymphoma of mycosis fungoides subtype (CTCL-MF), preferably advanced CTCL-MF, preferably cutaneous T-cell lymphoma refractory to local treatment or to chemotherapy; or follicular lymphoma; or marginal zone lymphoma, preferably nodal marginal zone lymphoma (nMZL); or mantle cell lymphoma; or primary cutaneous anaplastic large cell lymphoma (PC-ALCL); or soft tissue sarcoma (STS); or Human Papilloma Virus (HPV)-related cancer; or breast cancer; or hepatocellular carcinoma; or colorectal cancer (including MSI-High CRC); or neuroendocrine tumors; or pancreas cancer; or gastroesophageal cancer; or uveal melanoma; or penile cancer lymphoma. In certain embodiments of the invention, the terms “tumor”, “cancer” or “cancer disease” as used herein refer to basal cell carcinoma; or melanoma, preferably advanced and/or metastatic melanoma; squamous cell cancer (SCC), preferably SCC of the skin, more preferably unresectable and/or advanced SCC of the skin; or squamous cell carcinoma of the head and neck (HNSCC), preferably advanced and/or platinum-refractory and/or immunotherapy-refractory HNSCC; or vulvar carcinoma or vulvar squamous cell carcinoma (VSCC), preferably unresectable and/or advanced VSCC, more preferably advanced and/or platinum-refractory and/or immunotherapy-refractory VSCC; or adenocystic carcinoma (ACC), preferably advanced ACC; or cutaneous T-cell lymphoma, preferably advanced cutaneous T-cell lymphoma or cutaneous T-cell lymphoma of mycosis fungoides subtype (CTCL-MF), more preferably advanced CTCL-MF, more preferably advanced CTCL-MF refractory to local treatment or to chemotherapy; or follicular lymphoma; or marginal zone lymphoma, preferably nodal marginal zone lymphoma (nMZL); or primary cutaneous anaplastic large cell lymphoma (PC-ALCL); or soft tissue sarcoma (STS); or Human Papilloma Virus (HPV)-related cancer

[0081] According to a preferred embodiment, the invention thus concerns an isRNA for use in the treatment or prophylaxis of tumor and/or cancer diseases, wherein the tumor or the cancer disease is selected from the group consisting of melanoma, preferably advanced and/or metastatic melanoma, preferably advanced cutaneous melanoma (cMEL), squamous cell cancer of the skin (SCC), preferably unresectable and/or advanced SCC or cutaneous squamous cell carcinoma (cSCC), and/or squamous cell carcinoma of the head and neck (HNSCC), preferably advanced and/or immunotherapy-refractory platinum-refractory HNSCC, and/or adenocystic carcinoma (ACC), preferably advanced ACC, and/or cutaneous T-cell lymphoma, preferably advanced cutaneous T-cell lymphoma refractory to local treatment or to chemotherapy.

[0082] In a further preferred embodiment, the invention concerns an isRNA, preferably as described herein, for use in the treatment and/or prophylaxis of a tumor and/or cancer disease, wherein the tumor or cancer disease is selected from the group consisting of
[0083] melanoma, preferably advanced and/or metastatic melanoma, more preferably advanced cutaneous melanoma (cMEL);
[0084] squamous cell cancer (SCC) of the skin, preferably unresectable and/or advanced SCC of the skin, more preferably cutaneous squamous cell carcinoma (cSCC), even more preferably unresectable and/or advanced cSCC;
[0085] squamous cell carcinoma of the head and neck (HNSCC), preferably advanced HNSCC, more preferably immunotherapy-refractory or platinum-refractory HNSCC, even more preferably immunotherapy-refractory advanced HNSCC or platinum-refractory advanced HNSCC;
[0086] adenocystic carcinoma (ACC), preferably advanced ACC;
[0087] cutaneous T-cell lymphoma, preferably advanced cutaneous T-cell lymphoma or cutaneous T-cell lymphoma of mycosis fungoides subtype, more preferably cutaneous T-cell lymphoma refractory to local treatment or to chemotherapy, even more preferably advanced cutaneous T-cell lymphoma refractory to local treatment or to chemotherapy, or cutaneous T-cell lymphoma of mycosis fungoides subtype refractory to local treatment or to chemotherapy, and
[0088] vulvar cancer, preferably vulvar squamous cell cancer (VSCC), more preferably advanced VSCC, even more preferably VSCC refractory to surgery or chemotherapy, most preferably advanced VSCC refractory to surgery or chemotherapy.

[0089] According to a particularly preferred embodiment the invention concerns an isRNA, preferably as described herein, for use in the treatment and/or prophylaxis of a tumor and/or cancer disease, wherein the tumor or the cancer disease is selected from the group consisting of cutaneous melanoma (cMEL), cutaneous squamous cell carcinoma (cSCC), head and neck squamous cell carcinoma (HNSCC), adenoid cystic carcinoma (ACC), cutaneous T-cell lymphoma, preferably cutaneous T-cell lymphoma of mycosis fungoides subtype, and vulvar squamous cell cancer (VSCC), wherein the tumor or the cancer disease is preferably at an advanced stage and/or refractory to standard therapy.

[0090] According to a further particularly preferred embodiment, the invention concerns an isRNA for use in the treatment or prophylaxis of tumor and/or cancer diseases, wherein the tumor or the cancer disease is selected from the group consisting of advanced melanoma, preferably advanced cutaneous melanoma (cMEL), squamous cell carcinoma of the skin (SCC), preferably cutaneous squamous cell carcinoma (cSCC), squamous cell carcinoma of the head and neck (HNSCC), and adenoid cystic carcinoma (adenocystic carcinoma (ACC)).

[0091] In an alternative preferred embodiment the invention concerns an isRNA for use in the treatment or prophylaxis of tumor and/or cancer diseases, wherein the tumor or the cancer disease is selected from the group consisting of advanced cutaneous melanoma (cMEL), cutaneous squamous cell carcinoma (cSCC), head and neck squamous cell carcinoma (hnSCC), and adenoid cystic carcinoma (ACC).

[0092] According to a preferred embodiment, the isRNA as described herein is for use in the treatment of advanced melanoma preferably advanced cutaneous melanoma (cMEL), which was confirmed histologically, preferably an unresectable and/or metastatic (cutaneous) melanoma. More preferably, the melanoma is refractory to standard therapy, in particular to immunotherapy with a checkpoint inhibitor or immunostimulatory agent or with targeted chemotherapy or a combination thereof.

[0093] In another embodiment, the isRNA as described herein is for use in the treatment of advanced SCC, preferably cutaneous squamous cell carcinoma (cSCC), which was confirmed histologically, preferably an unresectable and/or metastatic SCC. More preferably, the SCC is refractory to standard therapy or no therapy exists for the SCC.

[0094] According to a preferred embodiment, the isRNA as described herein is for use in the treatment of locally advanced or advanced HNSCC, which was confirmed histologically, preferably an unresectable and/or recurrent and/or metastatic HNSCC. More preferably, the HNSCC is refractory to standard therapy, in particular to platinum-based therapy or radiation therapy or to immunotherapy with a checkpoint inhibitor or immunostimulatory agent, or a combination of any of the above.

[0095] According to a further preferred embodiment, the isRNA as described herein is for use in the treatment of adenocystic carcinoma (ACC), which was confirmed histologically, preferably an unresectable and/or recurrent and/or metastatic adenocystic carcinoma (ACC). More preferably, the ACC is refractory to standard therapy, in particular to platinum-based therapy or radiation therapy or to immunotherapy with a checkpoint inhibitor or immunostimulatory agent, or a combination of any of the above. According to another embodiment, the isRNA as described herein is for use in the treatment of cutaneous T-cell lymphoma, which was confirmed histologically, preferably an unresectable and/or recurrent and/or metastatic cutaneous T-cell lymphoma. More preferably, the cutaneous T-cell lymphoma is refractory to standard therapy, in particular to platinum-based therapy or radiation therapy or to immunotherapy with a checkpoint inhibitor or immunostimulatory agent, or a combination of any of the above.

[0096] According to a further embodiment, the isRNA as described herein is for use in the treatment of vulvar squamous cell cancer (VSCC), which was confirmed histologically, preferably an unresectable and/or recurrent and/or metastatic VSCC. More preferably, the VSCC is refractory to standard therapy, in particular to platinum-based therapy or radiation therapy or to immunotherapy with a checkpoint inhibitor or immunostimulatory agent, or a combination of any of the above.

[0097] In a preferred embodiment, the isRNA for use in the treatment or prophylaxis of a tumor and/or cancer disease, preferably as described herein, elicits an innate immune response, which may support an adaptive immune response.

[0098] The isRNA for use in the treatment or prophylaxis of a tumor and/or cancer disease as described herein, may preferably be any (double-stranded or single-stranded) RNA, e.g. a coding RNA, as defined herein. In a preferred embodiment, the isRNA for use in the treatment or prophylaxis of a tumor and/or cancer disease as described herein is a non-coding RNA. In this context, the term “non-coding” refers to the fact that the isRNA does preferably not encode a peptide or protein or that the isRNA does preferably not comprise a coding sequence, preferably as described herein.

[0099] In some embodiments, the isRNA for use in the treatment or prophylaxis of a tumor and/or cancer disease as described herein may be a single-stranded, a double-stranded or a partially double-stranded RNA, more preferably a single-stranded RNA, and/or a circular or linear RNA, more preferably a linear RNA. More preferably, the isRNA may be a (linear) single-stranded RNA. Even more preferably, the isRNA may be a (long) (linear) single-stranded) non-coding RNA. In this context, it is particular preferred that the isRNA carries a triphosphate at its 5′-end, which is typically the case for in vitro transcribed RNA. An isRNA may also occur as a short RNA oligonucleotide as defined herein.

[0100] The isRNA for use in the treatment or prophylaxis of a tumor and/or cancer disease as described herein may furthermore be selected from any class of RNA molecules, naturally occurding or prepared synthetically, and which can induce an innate immune response and which preferably supports an adaptive immune response induced by an antigen. In this context, an immune response may occur in various ways. A substantial factor for a suitable (adaptive) immune response is the stimulation of different T cell sub-populations. T-lymphocytes are typically divided into two sub-populations, the T-helper 1 (Th1) cells and the T-helper 2 (Th2) cells, with which the immune system is capable of destroying intracellular (Th1) and extracellular (Th2) pathogens (e.g. antigens). The two Th cell populations differ in the pattern of the effector proteins (cytokines) produced by them. Thus, Th1 cells assist the cellular immune response by activation of macrophages and cytotoxic T cells. Th2 cells, on the other hand, promote the humoral immune response by stimulation of B-cells for conversion into plasma cells and by formation of antibodies (e.g. against antigens). The Th1/Th2 ratio is therefore of great importance in the induction and maintenance of an adaptive immune response. In connection with the present invention, the Th1/Th2 ratio of the (adaptive) immune response is preferably shifted in the direction towards the cellular response (Th1 response) and a cellular immune response is thereby induced.

[0101] According to one example, the innate immune system, which may support an adaptive immune response, may be activated by ligands of Toll-like receptors (TLRs). TLRs are a family of highly conserved pattern recognition receptor (PRR) polypeptides that recognize pathogen-associated molecular patterns (PAMPs) and play a critical role in innate immunity in mammals. Currently at least thirteen family members, designated TLR1-TLR13 (Toll-like receptors: TLR1, TLR2, TLR3, TLR4, TLR5, TLR6, TLR7, TLR8, TLR9, TLR10, TLR11, TLR12 or TLR13), have been identified. Furthermore, a number of specific TLR ligands have been identified. It was found, for example, that un methylated bacterial DNA and synthetic analogs thereof (CpG DNA) are ligands for TLR9 (Hemmi H et al. (2000) Nature 408:740-5; Bauer S et al. (2001) Proc NatlAcadSci USA 98, 9237-42). Furthermore, it has been reported that ligands for certain TLRs include certain nucleic acid molecules and that certain types of RNA are immunostimulatory in a sequence-independent or sequence-dependent manner, wherein these various immunostimulatory RNAs may e.g. stimulate TLR3, TLR7, or TLR8, or intracellular receptors such as RIG-I, MDA-5, etc. For example, Lipford et al. determined certain G,U-containing oligoribonucleotides as immunostimulatory by acting via TLR7 and TLR8 (see WO 03/086280). The immunostimulatory G,U-containing oligoribonucleotides described by Lipford et al. were believed to be derivable from RNA sources including ribosomal RNA, transfer RNA, messenger RNA, and viral RNA.

[0102] Preferably, the isRNA for use in the treatment or prophylaxis of a tumor and/or cancer disease as described herein may comprise any RNA sequence known to be immunostimulatory, including, without being limited thereto, RNA sequences representing and/or encoding ligands of TLRs, preferably selected from human family members TLR1-TLR10 or murine family members TLR1-TLR13, more preferably selected from (human) family members TLR1-TLR10, even more preferably from TLR7 and TLR8, ligands for intracellular receptors for RNA (such as RIG-I or MDA-5, etc.) (see e.g. Meylan, E., Tschopp, J. (2006). Toll-like receptors and RNA helicases: two parallel ways to trigger antiviral responses. Mol. Cell 22, 561-569), or any other immunostimulatory RNA sequence. Furthermore, (classes of) immunostimulatory RNA molecules for use in the treatment or prophylaxis of a tumor and/or cancer disease as described herein, may include any other RNA capable of eliciting an immune response. Without being limited thereto, the isRNA for use in the treatment or prophylaxis of a tumor and/or cancer disease as described herein may include ribosomal RNA (rRNA), transfer RNA (tRNA), messenger RNA (mRNA), and viral RNA (vRNA). In preferred embodiments, the isRNA may have a length of 1000 to 5000, of 500 to 5000, of 5 to 5000, or of 5 to 1000, 5 to 500, 5 to 250, of 5 to 100, of 5 to 50 or of 5 to 30 nucleotides.

[0103] According to a particularly preferred embodiment, the isRNA for use in the treatment or prophylaxis of a tumor and/or cancer disease as described herein consists of or comprises a nucleic acid of the following formula (I) or (II):

GₗXₘGₙ, (formula (I))

[0104] wherein:
[0105] G is guanosine (guanine), uridine (uracil) or an analogue of guanosine (guanine) or uridine (uracil);
[0106] X is guanosine (guanine), (uridine) uracil, adenosine (adenine), thymidine (thymine), cytidine (cytosine) or an analogue of the above-mentioned nucleotides (nucleosides);
[0107] l is an integer from 1 to 40,
   [0108] wherein
   [0109] when I=1 G is guanosine (guanine) or an analogue thereof,
   [0110] when I>1 at least 50% of the nucleotides (nucleosides) are guanosine (guanine) or an analogue thereof;
[0111] m is an integer and is at least 3;
   [0112] wherein
   [0113] when m=3 X is uridine (uracil) or an analogue thereof,
   [0114] when m>3 at least 3 successive uridines (uracils) or analogues of uridine (uracil) occur;
[0115] n is an integer from 1 to 40,
   [0116] wherein
   [0117] when n=1 G is guanosine (guanine) or an analogue thereof,
   [0118] when n>1 at least 50% of the nucleotides (nucleosides) are guanosine (guanine) or an analogue thereof;

CₗXₘCₙ, (formula (II))

[0119] wherein:
[0120] C is cytidine (cytosine), uridine (uracil) or an analogue of cytidine (cytosine) or uridine (uracil);
[0121] X is guanosine (guanine), uridine (uracil), adenosine (adenine), thymidine (thymine), cytidine (cytosine) or an analogue of the above-mentioned nucleotides (nucleosides);
[0122] l is an integer from 1 to 40,
   [0123] wherein
   [0124] when I=1 C is cytidine (cytosine) or an analogue thereof,
   [0125] when I>1 at least 50% of the nucleotides (nucleosides) are cytidine (cytosine) or an analogue thereof;
[0126] m is an integer and is at least 3;
   [0127] wherein
   [0128] when m=3 X is uridine (uracil) or an analogue thereof,
   [0129] when m>3 at least 3 successive uridines (uracils) or analogues of uridine (uracil) occur;
[0130] n is an integer from 1 to 40,
   [0131] wherein
   [0132] when n=1 C is cytidine (cytosine) or an analogue thereof,
   [0133] when n>1 at least 50% of the nucleotides (nucleosides) are cytidine (cytosine) or an analogue thereof.

[0134] The nucleic acids of formula (I) or (II), which may be used as isRNA may be relatively short nucleic acid molecules with a typical length of approximately from 5 to 100 (but may also be longer than 100 nucleotides for specific embodiments, e.g. up to 200 nucleotides), from 5 to 90 or from 5 to 80 nucleotides, preferably a length of approximately from 5 to 70, more preferably a length of approximately from 8 to 60 and, more preferably a length of approximately from 15 to 60 nucleotides, more preferably from 20 to 60, most preferably from 30 to 60 nucleotides. If the nucleic acid of the inventive nucleic acid cargo complex has a maximum length of, for example, 100 nucleotides, m will typically be 98. The number of nucleotides G in the nucleic acid of formula (I) is determined by l or n. l and n, independently of one another, are each an integer from 1 to 40, wherein when l or n=1 G is guanosine or an analogue thereof, and when l or n>1 at least 50% of the nucleotides are guanosine or an analogue thereof. For example, without implying any limitation, when l or n=4 Gl or Gn can be, for example, a GUGU, GGUU, UGUG, UUGG, GUUG, GGGU, GGUG, GUGG, UGGG or GGGG, etc.; when l or n=5 Gl or Gn can be, for example, a GGGUU, GGUGU, GUGGU, UGGGU, UGGUG, UGUGG, UUGGG, GUGUG, GGGGU, GGGUG, GGUGG, GUGGG, UGGGG, or GGGGG, etc.; etc. A nucleotide adjacent to Xₘ in the nucleic acid of formula (I) according to the invention is preferably not a uracil. Similarly, the number of nucleotides C in the nucleic acid of formula (II) according to the invention is determined by l or n. l and n, independently of one another, are each an integer from 1 to 40, wherein when l or n=1 C is cytidine or an analogue thereof, and when l or n>1 at least 50% of the nucleotides are cytidine or an analogue thereof. For example, without implying any limitation, when l or n=4, Cl or Cn can be, for example, a CUCU, CCUU, UCUC, UUCC, CUUC, CCCU, CCUC, CUCC, UCCC or CCCC, etc.; when l or n=5 Cl or Cn can be, for example, a CCCUU, CCUCU, CUCCU, UCCCU, UCCUC, UCUCC, UUCCC, CUCUC, CCCCU, CCCUC, CCUCC, CUCCC, UCCCC, or CCCCC, etc.; etc. A nucleotide adjacent to Xₘ in the nucleic acid of formula (II) according to the invention is preferably not a uracil. Preferably, for formula (I), when l or n>1, at least 60%, 70%, 80%, 90% or even 100% of the nucleotides are guanosine or an analogue thereof, as defined above. The remaining nucleotides to 100% (when guanosine constitutes less than 100% of the nucleotides) in the flanking sequences G1 and/or Gn are uridine or an analogue thereof, as defined hereinbefore. Also preferably, l and n, independently of one another, are each an integer from 2 to 30, more preferably an integer from 2 to 20 and yet more preferably an integer from 2 to 15. The lower limit of l or n can be varied if necessary and is at least 1, preferably at least 2, more preferably at least 3, 4, 5, 6, 7, 8, 9 or 10. This definition applies correspondingly to formula (II).

[0135] According to a particularly preferred embodiment, a nucleic acid according to any of formulas (I) or (II) above, which may be used as isRNA in the context of the present invention, may be selected from a nucleic acid sequence consisting or comprising any of the following sequences SEQ ID NOs: 471 to 554, or from a sequence having at least 60%, 70%, 80%, 90%, or even 95% sequence identity with any of these sequences. In some embodiments, the isRNA is selected from a nucleic acid sequence consisting or comprising any one of the nucleic acid sequences SEQ ID NOs: 471 to 554, or a fragment or variant of any one of these sequences.

[0136] According to a further preferred embodiment, the isRNA for use in the treatment or prophylaxis of a tumor and/or cancer disease as described herein consists of or comprises a nucleic acid of formula (III) or (IV):

(NᵤGₗXₘGₙNᵥ)ₐ, (formula (III))

[0137] wherein:
[0138] G is guanosine (guanine), uridine (uracil) or an analogue of guanosine (guanine) or uridine (uracil), preferably guanosine (guanine) or an analogue thereof;
[0139] X is guanosine (guanine), uridine (uracil), adenosine (adenine), thymidine (thymine), cytidine (cytosine), or an analogue of these nucleotides (nucleosides), preferably uridine (uracil) or an analogue thereof;
[0140] N is a nucleic acid sequence having a length of about 4 to 50, preferably of about 4 to 40, more preferably of about 4 to 30 or 4 to 20 nucleic acids, each N independently being selected from guanosine (guanine), uridine (uracil), adenosine (adenine), thymidine (thymine), cytidine (cytosine) or an analogue of these nucleotides (nucleosides);
[0141] a is an integer from 1 to 20, preferably from 1 to 15, most preferably from 1 to 10;
[0142] l is an integer from 1 to 40,
   [0143] wherein when I=1, G is guanosine (guanine) or an analogue thereof,
   [0144] when l>1, at least 50% of these nucleotides (nucleosides) are guanosine (guanine) or an analogue thereof;
[0145] m is an integer and is at least 3;
   [0146] wherein when m=3, X is uridine (uracil) or an analogue thereof, and
   [0147] when m>3, at least 3 successive uridines (uracils) or analogues of uridine (uracil) occur;
[0148] n is an integer from 1 to 40,
   [0149] wherein when n=1, G is guanosine (guanine) or an analogue thereof,
   [0150] when n>1, at least 50% of these nucleotides (nucleosides) are guanosine (guanine) or an analogue thereof;
[0151] u,v may be independently from each other an integer from 0 to 50, preferably wherein when u=0, v 1, or when v=0, u≥1;
   wherein the nucleic acid molecule of formula (III) has a length of at least 50 nucleotides, preferably of at least 100 nucleotides, more preferably of at least 150 nucleotides, even more preferably of at least 200 nucleotides and most preferably of at least 250 nucleotides.

(NᵤCₗXₘCₙNᵥ)ₐ, (formula (IV))

[0152] wherein:
[0153] C is cytidine (cytosine), uridine (uracil) or an analogue of cytidine (cytosine) or uridine (uracil), preferably cytidine (cytosine) or an analogue thereof;
[0154] X is guanosine (guanine), uridine (uracil), adenosine (adenine), thymidine (thymine), cytidine (cytosine) or an analogue of the above-mentioned nucleotides (nucleosides), preferably uridine (uracil) or an analogue thereof;
[0155] N is each a nucleic acid sequence having independent from each other a length of about 4 to 50, preferably of about 4 to 40, more preferably of about 4 to 30 or 4 to 20 nucleic acids, each N independently being selected from guanosine (guanine), uridine (uracil), adenosine (adenine), thymidine (thymine), cytidine (cytosine) or an analogue of these nucleotides (nucleosides);
[0156] a is an integer from 1 to 20, preferably from 1 to 15, most preferably from 1 to 10;
[0157] l is an integer from 1 to 40,
   [0158] wherein when I=1, C is cytidine (cytosine) or an analogue thereof,
   [0159] when I>1, at least 50% of these nucleotides (nucleosides) are cytidine (cytosine) or an analogue thereof;
[0160] m is an integer and is at least 3;
   [0161] wherein when m=3, X is uridine (uracil) or an analogue thereof,
   [0162] when m>3, at least 3 successive uridines (uracils) or analogues of uridine (uracil) occur;
[0163] n is an integer from 1 to 40,
   [0164] wherein when n=1, C is cytidine (cytosine) or an analogue thereof,
   [0165] when n>1, at least 50% of these nucleotides (nucleosides) are cytidine (cytosine) or an analogue thereof.
[0166] u, v may be independently from each other an integer from 0 to 50,
   [0167] preferably wherein when u=0, v 1, or when v=0, u≥1;
      wherein the nucleic acid molecule of formula (V) according to the invention has a length of at least 50 nucleotides, preferably of at least 100 nucleotides, more preferably of at least 150 nucleotides, even more preferably of at least 200 nucleotides and most preferably of at least 250 nucleotides.

[0168] For formula (IV), any of the definitions given above for elements N (i.e. Nᵤ and Nᵥ) and X (Xₘ), particularly the core structure as defined above, as well as for integers a, l, m, n, u and v, similarly apply to elements of formula (IV) correspondingly, wherein in formula (IV) the core structure is defined by CₗXₘCₙ. The definition of bordering elements Nᵤ and Nᵥ is identical to the definitions given above for Nᵤ and Nv.

[0169] According to a very particularly preferred embodiment, the nucleic acid molecule, preferably immunostimulating RNA according to formula (III) may be selected from e.g. any of the sequences according to SEQ ID NOs: 555 to 563 or from a sequence having at least 60%, 70%, 80%, 90%, or even 95% sequence identity with any of these sequences. Preferably, the isRNA as used herein comprises or consists of a nucleic acid sequence according to any one of SEQ ID NO: 555 to 563, or a fragment or variant of any one of these sequences.

[0170] In this context particularly preferred are immunostimulating RNAs according to any one of SEQ ID NOs: 433 to 437, 1014 to 1016, 1055 or 1056. More preferably, an immunostimulating RNA as used herein, comprises or consists of a nucleic acid sequence according to any one of SEQ ID NOs: 433 to 437, 1014 to 1016, 1055 or 1056, or a fragment or variant of any one of these sequences. Even more preferably, the immunostimulating RNA comprises or consists of a nucleic acid sequence having at least 60%, 70%, 80%, 90%, or even 95% sequence identity with any one of the nucleic acid sequences according to SEQ ID NOs: 433 to 437, 1014 to 1016, 1055 or 1056.

[0171] According to a particularly preferred embodiment, an immunostimulating RNA as used herein, comprises or consists of a nucleic acid sequence according to any one of SEQ ID NOs: 433; 434, or 1014 to 1016, or a fragment or variant of any one of these sequences. Even more preferably, the immunostimulating RNA comprises or consists of a nucleic acid sequence having at least 60%, 70%, 80%, 90%, or even 95% sequence identity with the nucleic acid sequence according to any one of SEQ ID NOs: 433, 434 or 1014 to 1016.

[0172] According to another very particularly preferred embodiment, the nucleic acid molecule according to formula (IV) may be selected from e.g. any of the sequences according to SEQ ID NOs: 433; 434, or 1014 to 1016, or from a sequence having at least 60%, 70%, 80%, 90%, or even 95% sequence identity with any of these sequences. Preferably, the isRNA as used herein comprises or consists of a nucleic acid sequence according to SEQ ID NO: 433; 434 or 1014 to 1016, or a fragment or variant of any one of these sequences.

[0173] Further, all modifications disclosed herein in the context of coding RNA may also be applied to non-coding RNA, if applicable.

[0174] The isRNA for use as described herein may be administered naked without being associated with any further vehicle, carrier, transfection or complexation agent.

[0175] In a preferred embodiment, the isRNA for use in the treatment or prophylaxis of a tumor and/or cancer disease as described herein is formulated together with further compounds for increasing the transfection efficiency and/or the immunostimulatory properties of the isRNA. Such compounds are also termed herein carriers, vehicles, transfection or complexation agents. Preferably, the isRNA for use in the treatment or prophylaxis of a tumor and/or cancer disease as described herein is complexed with a cationic or polycationic compound, preferably with a cationic or polycationic polymer, a cationic or polycationic peptide or protein, e.g. protamine, a cationic or polycationic polysaccharide and/or a cationic or polycationic lipid. According to a particularly preferred embodiment, the isRNA for use in the treatment or prophylaxis of a tumor and/or cancer disease as described herein is complexed with a cationic or polycationic compound, wherein the cationic or polycationic compound is a polymeric carrier.

[0176] Such cationic or polycationic polymers, cationic or polycationic peptides or proteins, cationic or polycationic polysaccharides, cationic or polycationic lipids or polymeric carriers are useful as carriers, vehicles, transfection or complexation agents of nucleic acids in the context of the present invention, in particular of the isRNA for use as described herein. Accordingly, in a further embodiment of the invention it is preferred that the isRNA is associated with or complexed with a cationic or polycationic compound or a polymeric carrier, optionally in a weight ratio selected from a range of about 6:1 (w/w) to about 0.25:1 (w/w), more preferably from about 5:1 (w/w) to about 0.5:1 (w/w), even more preferably of about 4:1 (w/w) to about 1:1 (w/w) or of about 3:1 (w/w) to about 1:1 (w/w), and most preferably a ratio of about 3:1 (w/w) to about 2:1 (w/w) of RNA to cationic or polycationic compound and/or with a polymeric carrier; or optionally in a nitrogen/phosphate ratio of RNA to cationic or polycationic compound and/or polymeric carrier in the range of about 0.1 to 10, preferably in a range of about 0.3 to 4 or 0.3 to 1, and most preferably in a range of about 0.5-1 or 0.7 to 1, and even most preferably in a range of about 0.3 to 0.9 or 0.5 to 0.9.

[0177] The ratio of the isRNA for use in the treatment or prophylaxis of a tumor and/or cancer disease as described herein, and the cationic or polycationic compound, may be calculated on the basis of the nitrogen/phosphate ratio (N/P-ratio) of all these components. In the context of the present invention, an N/P-ratio is preferably in the range of about 0.01 to 4, 0.01 to 2, 0.1 to 2 or 0.1 to 1.5 regarding the ratio of nucleic acids: cationic or polycationic peptide contained in the inventive vaccine, and most preferably in the range of about 0.1 to 1. Alternatively, the N/P ratio of the isRNA to the cationic or polycationic compound, preferably the cationic or polycationic peptide or protein, is in the range of about 0.1 to 10, including a range of about 0.3 to 4, of about 0.5 to 2, of about 0.7 to 2 and of about 0.7 to 1.5. Such an N/P ratio is preferably designed to provide good transfection properties in vivo and transport into and through cell membranes. Preferably, for this purpose, cationic or polycationic compound and/or polymeric carriers as used herein, are based on peptide sequences.

[0178] Cationic or polycationic compounds, being particularly preferred agents in this context include protamine, nucleoline, spermine or spermidine, or other cationic peptides or proteins, such as poly-L-lysine (PLL), poly-arginine, basic polypeptides, cell penetrating peptides (CPPs), including HIV-binding peptides, HIV-1 Tat (HIV), Tat-derived peptides, Penetratin, VP22 derived or analog peptides, HSV VP22 (Herpes simplex), MAP, KALA (SEQ ID NO: 1063 ) or protein transduction domains (PTDs), PpT620, proline-rich peptides, arginine-rich peptides, lysine-rich peptides, MPG-peptide(s), Pep-1, L-oligomers, Calcitonin peptide(s), Antennapedia-derived peptides (particularly from Drosophila antennapedia), pAntp, pIsl, FGF, Lactoferrin, Transportan, Buforin-2, Bac715-24, SynB, SynB(1), pVEC, hCT-derived peptides, SAP, or histones. In this context, protamine is particularly preferred.

[0179] Additionally, preferred cationic or polycationic proteins or peptides may be selected from the following proteins or peptides having the following total formula (V):

(Arg)ₗ;(Lys)ₘ;(His)ₙ;(Orn)ₒ;(Xaa)ₓ, (formula (V)

wherein l+m+n+o+x=8-15, and l, m, n or o independently of each other may be any number selected from 0, 1, 2, 3, 4, 5, 6, 7, 8, 9, 10, 11, 12, 13, 14 or 15, provided that the overall content of Arg, Lys, His and Orn represents at least 50% of all amino acids of the oligopeptide; and Xaa may be any amino acid selected from native (=naturally occurring) or non-native amino acids except of Arg, Lys, His or Orn; and x may be any number selected from 0, 1, 2, 3 or 4, provided, that the overall content of Xaa does not exceed 50% of all amino acids of the oligopeptide. Particularly preferred cationic peptides in this context are e.g. Arg₇ (SEQ ID NO: 1064), Arg₈ (SEQ ID NO: 1065), Arg₈ (SEQ ID NO: 1066), H₃R₉ (SEQ ID NO: 1067), R₉H₃ (SEQ ID NO: 1068), H₃R₉H₃ (SEQ ID NO: 1069), YSSR₉SSY (SEQ ID NO: 1070), (RKH)₄ (SEQ ID NO: 1071), Y(RKH)₂R (SEQ ID NO: 1072), etc. In this context the disclosure of WO 2009/030481 is incorporated herewith by reference.

[0180] A polymeric carrier used according to the invention might be a polymeric carrier formed by disulfide-crosslinked cationic components.

[0181] According to a further particularly preferred embodiment, cationic or polycationic peptides or proteins of the polymeric carrier, having the empirical sum formula (V) as shown above and which comprise or are additionally modified to comprise at least one —SH moeity, may be, without being restricted thereto, selected from the subgroup consisting of generic formulas Arg₇ (also termed as R₇; SEQ ID NO: 1064), Arg₉ (also termed R₉; SEQ ID NO: 1066), Arg₁₂ (also termed as R₁₂; SEQ ID NO: 1073).

[0182] According to a one further particularly preferred embodiment, the cationic or polycationic peptide or protein of the polymeric carrier, when defined according to formula {(Arg)ₗ;(Lys)ₘ;(His)ₙ;(Orn)ₒ;(Xaa)ₓ} (formula (V)) as shown above and which comprise or are additionally modified to comprise at least one —SH moeity, may be, without being restricted thereto, selected from subformula (Va):

{(Arg)ₗ;(Lys)ₘ;(His)ₙ;(Orn)ₒ;(xaa′)ₓ(Cys)_{y}} formula (Va)

wherein (Arg)ₗ;(Lys)ₘ;(His)ₙ;(Orn)ₒ; and x are as defined herein, Xaa′ is any amino acid selected from native (=naturally occurring) or non-native amino acids except of Arg, Lys, His, Orn or Cys and y is any number selected from 0, 1, 2, 3, 4, 5, 6, 7, 8, 9, 10, 11, 12, 13, 14, 15, 16, 17, 18, 19, 20, 21-30, 31-40, 41-50, 51-60, 61-70, 71-80 and 81-90, provided that the overall content of Arg (Arginine), Lys (Lysine), His (Histidine) and Orn (Ornithine) represents at least 10% of all amino acids of the oligopeptide.

[0183] This embodiment may apply to situations, wherein the cationic or polycationic peptide or protein of the polymeric carrier, e.g. when defined according to empirical formula (Arg)ₗ;(Lys)ₘ;(His)ₙ;(Orn)ₒ;(Xaa)ₓ (formula (V)) as shown above, comprises or has been modified with at least one cysteine as —SH moiety in the above meaning such that the cationic or polycationic peptide as cationic component carries at least one cysteine, which is capable to form a disulfide bond with other components of the polymeric carrier. Examples may comprise any of the following sequences:

(SEQ ID NO: 581)
Cys(Arg₇),
(SEQ ID NO: 582)
Cys(Arg₈),
(SEQ ID NO: 583)
Cys(Arg₉),
(SEQ ID NO: 584)
Cys(Arg₁₀),
(SEQ ID NO: 585)
Cys(Arg₁₁),
(SEQ ID NO: 580)(SEQ ID NO: 571)
Cys(Arg₁₂),
(SEQ ID NO: 586)
Cys(Arg₁₃),
(SEQ ID NO: 587)
Cys(Arg₁₄),
(SEQ ID NO: 588)
Cys(Arg₁₅),
(SEQ ID NO: 589)
Cys(Arg₁₆),
(SEQ ID NO: 590)
Cys(Arg₁₇),
(SEQ ID NO: 591)
Cys(Arg₁₈),
(SEQ ID NO: 592)
Cys(Arg₁₉),
(SEQ ID NO: 593)
Cys(Arg₂₀).

[0184] According to another particularly preferred embodiment, the cationic or polycationic peptide or protein of the polymeric carrier, when defined according to formula {(Arg)ₗ;(Lys)ₘ;(His)ₙ;(Orn)ₒ;(Xaa)ₓ} (formula (V)) as shown above, may be, without being restricted thereto, selected from subformula (Vb):

Cys1{(Arg)ₗ;(Lys)ₘ;(His)ₙ;(Orn)ₒ;(Xaa)ₓ}Cys2 (formula (Vb))

wherein empirical formula {(Arg)ₗ;(Lys)ₘ;(His)ₙ;(Orn)ₒ;(Xaa)ₓ} (formula (V)) is as defined herein and forms a core of an amino acid sequence according to (semiempirical) formula (V) and wherein Cys1 and Cys2 are cysteines proximal to, or terminal to (Arg)ₗ;(Ls)ₘ;(His)ₙ;(Orn)ₒ;(Xaa)ₓ. Examples may comprise any of the above sequences flanked by two Cys and following sequences:

(SEQ ID NO: 566)
Cys(Arg₇)Cys,
(SEQ ID NO: 567)
Cys(Arg₈)Cys,
(SEQ ID NO: 568)
Cys(Arg₉)Cys,
(SEQ ID NO: 569
Cys(Arg₁₀)Cys,
(SEQ ID NO: 570)
Cys(Arg₁₁)Cys,
(SEQ ID NO: 579)
Cys(Arg₁₂)Cys,
(SEQ ID NO: 571)
Cys(Arg₁₃)Cys,
(SEQ ID NO: 572)
Cys(Arg₁₄)Cys,
(SEQ ID NO: 573)
Cys(Arg₁₅)Cys,
(SEQ ID NO: 574)
Cys(Arg₁₆)Cys,
(SEQ ID NO: 575)
Cys(Arg₁₇)Cys,
(SEQ ID NO: 576)
Cys(Arg₁₈)Cys,
(SEQ ID NO: 577)
Cys(Arg₁₉)Cys,
(SEQ ID NO: 578)
Cys(Arg₂₀)Cys.

[0185] This embodiment may apply to situations, wherein the cationic or polycationic peptide or protein of the polymeric carrier, e.g. when defined according to empirical formula (Arg)ₗ;(Lys)ₘ;(His)ₙ;(Orn)ₒ;(Xaa)ₓ (formula (V)) as shown above, has been modified with at least two cysteines as —SH moieties in the above meaning such that the cationic or polycationic peptide of the inventive polymeric carrier cargo complex as cationic component carries at least two (terminal) cysteines, which are capable to form a disulfide bond with other components of the polymeric carrier.

[0186] In a preferred embodiment, the polymeric carrier is formed by, comprises or consists of the peptide CysArg₁₂Cys (CRRRRRRRRRRRRC) (SEQ ID NO: 579) or CysArg₁₂ (CRRRRRRRRRRRR) (SEQ ID NO: 580). In some embodiments, the polymeric carrier compound is formed by, comprises or consists of a (R12C)—(R12C) dimer (Arg₁₂Cys-CysArg₁₂ dimer, (SEQ ID NO: 1077)), wherein the individual peptide monomers in the dimer (CR12 (CysArg₁₂; SEQ ID NO: 580)), are connected via —SH groups. In further preferred embodiments, the polymeric carrier compound is formed by, comprises or consists of a (WR12C) (WR12C) dimer (TrpArg₁₂Cys-CysArg₁₂Trp dimer (SEQ ID NO: 1078)), wherein the individual peptide monomers in the dimer (WR12C (TrpArg₁₂Cys; SEQ ID NO: 1017)), are connected via —SH groups. According to certain embodiments, the polymeric carrier compound is formed by, comprises or consists of a (CR12)-(CR12C)—(CR12) trimer (Arg₁₂Cys-CysArg₁₂Cys-CysArg₁₂ trimer (SEQ ID NO: 1079)), wherein the individual peptide monomers in the dimer (CR12C (CysArg₁₂Cys; SEQ ID NO: 579) and CR12 (CysArg₁₂; SEQ ID NO: 580)), are connected via —SH groups. In specific embodiments, the polymeric carrier consists of a (R12C)—(R12C) dimer, a (WR12C)—(WR12C) dimer, or a (CR12)-(CR12C)—(CR12) trimer (SEQ ID NO: 1079), wherein the individual cationic peptide (elements) in the dimer (e.g., (WR12C (SEQ ID NO: 1017))), or the trimer (e.g., (CR12 (SEQ ID NO: 580))) are connected via —SH groups of their cysteine residues.

[0187] According to a second alternative, at least one cationic (or polycationic) component of the polymeric carrier may be selected from e.g. any (non-peptidic) cationic or polycationic polymer suitable in this context, provided that this (non-peptidic) cationic or polycationic polymer exhibits or is modified to exhibit at least one —SH-moiety, which provides for a disulfide bond linking the cationic or polycationic polymer with another component of the polymeric carrier as defined herein. Thus, likewise as defined herein, the polymeric carrier may comprise the same or different cationic or polycationic polymers.

[0188] In the specific case that the cationic component of the polymeric carrier comprises a (non-peptidic) cationic or polycationic polymer the cationic properties of the (non-peptidic) cationic or polycationic polymer may be determined upon its content of cationic charges when compared to the overall charges of the components of the cationic polymer. Preferably, the content of cationic charges in the cationic polymer at a (physiological) pH as defined herein is at least 10%, 20%, or 30%, preferably at least 40%, more preferably at least 50%, 60% or 70%, but also preferably at least 80%, 90%, or even 95%, 96%, 97%, 98%, 99% or 100%, most preferably at least 30%, 40%, 50%, 60%, 70%, 80%, 90%, 95%, 96%, 97%, 98%, 99% or 100%, or may be in the range of about 10% to 90%, more preferably in the range of about 30% to 100%, even preferably in the range of about 50% to 100%, e.g. 50, 60, 70, 80%, 90% or 100%, or in a range formed by any two of the afore mentioned values, provided, that the content of all charges, e.g. positive and negative charges at a (physiological) pH as defined herein, in the entire cationic polymer is 100%.

[0189] Preferably, the (non-peptidic) cationic component of the polymeric carrier represents a cationic or polycationic polymer, typically exhibiting a molecular weight of about 0.1 or 0.5 kDa to about 100 kDa, preferably of about 1 kDa to about 75 kDa, more preferably of about 5 kDa to about 50 kDa, even more preferably of about 5 kDa to about 30 kDa, or a molecular weight of about 10 kDa to about 50 kDa, even more preferably of about 10 kDa to about 30 kDa. Additionally, the (non-peptidic) cationic or polycationic polymer typically exhibits at least one —SH-moiety, which is capable to form a disulfide linkage upon condensation with either other cationic components or other components of the polymeric carrier as defined herein.

[0190] In the above context, the (non-peptidic) cationic component of the polymeric carrier may be selected from acrylates, modified acrylates, such as pDMAEMA (poly(dimethylaminoethyl methylacrylate)), chitosanes, aziridines or 2-ethyl-2-oxazoline (forming oligo ethylenimines or modifed oligoethylenimines), polymers obtained by reaction of bisacrylates with amines forming oligo beta aminoesters or poly amido amines, or other polymers like polyesters, polycarbonates, etc. Each molecule of these (non-peptidic) cationic or polycationic polymers typically exhibits at least one —SH-moiety, wherein these at least one —SH-moiety may be introduced into the (non-peptidic) cationic or polycationic polymer by chemical modifications, e.g. using imonothiolan, 3-thio propionic acid or introduction of —SH-moieties containing amino acids, such as cysteine or any further (modified) amino acid. Such —SH-moieties are preferably as already defined above.

[0191] The disulfide-crosslinked cationic components may be the same or different from each other. The polymeric carrier can also contain further components. It is also particularly preferred that the polymeric carrier used according to the present invention comprises mixtures of cationic peptides, proteins or polymers and optionally further components as defined herein, which are crosslinked by disulfide bonds as described herein. In this context, the disclosure of WO 2012/013326 is incorporated herewith by reference.

[0192] In this context, the cationic components, which form basis for the polymeric carrier by disulfide-crosslinkage, are typically selected from any suitable cationic or polycationic peptide, protein or polymer suitable for this purpose, particular any cationic or polycationic peptide, protein or polymer capable to complex the isRNA for use as described herein, and thereby preferably condensing the isRNA. The cationic or polycationic peptide, protein or polymer, is preferably a linear molecule. However, branched cationic or polycationic peptides, proteins or polymers may also be used.

[0193] Every disulfide-crosslinking cationic or polycationic protein, peptide or polymer of the polymeric carrier, which may be used to complex the isRNA for use as described herein contains at least one —SH moiety, most preferably at least one cysteine residue or any further chemical group exhibiting an —SH moiety, capable to form a disulfide linkage upon condensation with at least one further cationic or polycationic protein, peptide or polymer as cationic component of the polymeric carrier as mentioned herein.

[0194] As defined above, the polymeric carrier, which may be used to complex the isRNA for use as described herein may be formed by disulfide-crosslinked cationic (or polycationic) components.

[0195] A complex of a nucleic acid, such as the isRNA for use as described herein, complexed with such polymeric carriers are also referred to herein as “polymeric carrier cargo complexes”.

[0196] In this context, it is particularly preferred that the isRNA for use in the treatment or prophylaxis of a tumor and/or cancer disease as described herein is complexed with a polymeric carrier as defined above. Preferably, the isRNA, (e.g. comprising an RNA sequence according to any of formulae I to IV), more preferably comprising an RNA sequence according to any one of SEQ ID NOs. 433 to 437, 1014 to 1016, or a fragment or variant of any one of these sequences, most preferably comprising an RNA sequence according to any one of SEQ ID NOs: 433, 434 or 1014 to 1016, or a fragment or variant of any one of these sequences, is complexed with a polymeric carrier comprising or formed by disulfide-crosslinked peptides according to formula V, Va or Vb, preferably a polymeric carrier formed by Cys(Arg₁₂)Cys (SEQ ID NO: 579) or Cys(Arg₁₂) (SEQ ID NO: 580). Such a particularly preferred embodiment is also termed herein “RNAdjuvant”.

[0197] In a further particular embodiment, the polymeric carrier which may be used to complex the isRNA for use in the treatment or prophylaxis of a tumor and/or cancer disease as described herein may be selected from a polymeric carrier molecule according to generic formula (VI):

L-P¹S—[S—P²—S]ₙ—S—P³-L formula (VI)

wherein,
[0198] P¹ and P³ are different or identical to each other and represent a linear or branched hydrophilic polymer chain, each P¹ and P³ exhibiting at least one —SH-moiety, capable to form a disulfide linkage upon condensation with component P², or alternatively with (AA), (AA)ₓ, or [(AA)ₓ]_{z} if such components are used as a linker between P¹ and P² or P³ and P² and/or with further components (e.g. (AA), (AA)ₓ, [(AA)ₓ]_{z} or L), the linear or branched hydrophilic polymer chain selected independent from each other from polyethylene glycol (PEG), poly-N-(2-hydroxypropyl)methacrylamide, poly-2-(methacryloyloxy)ethyl phosphorylcholines, poly(hydroxyalkyl L-asparagine), poly(2-(methacryloyloxy)ethyl phosphorylcholine), hydroxyethylstarch or poly(hydroxyalkyl L-glutamine), wherein the hydrophilic polymer chain exhibits a molecular weight of about 1 kDa to about 100 kDa, preferably of about 2 kDa to about 25 kDa; or more preferably of about 2 kDa to about 10 kDa, e.g. about 5 kDa to about 25 kDa or 5 kDa to about 10 kDa;
[0199] P₂ is a cationic or polycationic peptide or protein, e.g. as defined above for the polymeric carrier formed by disulfide-crosslinked cationic components, and preferably having a length of about 3 to about 100 amino acids, more preferably having a length of about 3 to about 50 amino acids, even more preferably having a length of about 3 to about 25 amino acids, e.g. a length of about 3 to 10, 5 to 15, 10 to 20 or 15 to 25 amino acids, more preferably a length of about 5 to about 20 and even more preferably a length of about 10 to about 20; or
   [0200] is a cationic or polycationic polymer, e.g. as defined above for the polymeric carrier formed by disulfide-crosslinked cationic components, typically having a molecular weight of about 0.5 kDa to about 30 kDa, including a molecular weight of about 1 kDa to about 20 kDa, even more preferably of about 1.5 kDa to about 10 kDa, or having a molecular weight of about 0.5 kDa to about 100 kDa, including a molecular weight of about 10 kDa to about 50 kDa, even more preferably of about 10 kDa to about 30 kDa;
   [0201] each P² exhibiting at least two —SH-moieties, capable to form a disulfide linkage upon condensation with further components P² or component(s) P¹ and/or P³ or alternatively with further components (e.g. (AA), (AA)ₓ, or [(AA)ₓ]_{z});
[0202] —S—S— is a (reversible) disulfide bond (the brackets are omitted for better readability), wherein S preferably represents sulphur or a —SH carrying moiety, which has formed a (reversible) disulfide bond. The (reversible) disulfide bond is preferably formed by condensation of —SH-moieties of either components P¹ and P², P² and P², or P² and P³, or optionally of further components as defined herein (e.g. L, (AA), (AA)ₓ, [(AA)ₓ]_{z}, etc); The —SH-moiety may be part of the structure of these components or added by a modification as defined below;
[0203] L is an optional ligand, which may be present or not, and may be selected independent from the other from RGD, Transferrin, Folate, a signal peptide or signal sequence, a localization signal or sequence, a nuclear localization signal or sequence (NLS), an antibody, a cell penetrating peptide, (e.g. TAT or KALA (SEQ ID NO: 1063)), a ligand of a receptor (e.g. cytokines, hormones, growth factors etc), small molecules (e.g. carbohydrates like mannose or galactose or synthetic ligands), small molecule agonists, inhibitors or antagonists of receptors (e.g. RGD peptidomimetic analogues), or any further protein as defined herein, etc.;
[0204] n is an integer, typically selected from a range of about 1 to 50, preferably from a range of about 1, 2 or 3 to 30, more preferably from a range of about 1, 2, 3, 4, or 5 to 25, or a range of about 1, 2, 3, 4, or 5 to 20, or a range of about 1, 2, 3, 4, or 5 to 15, or a range of about 1, 2, 3, 4, or 5 to 10, including e.g. a range of about 4 to 9, 4 to 10, 3 to 20, 4 to 20, 5 to 20, or 10 to 20, or a range of about 3 to 15, 4 to 15, 5 to 15, or 10 to 15, or a range of about 6 to 11 or 7 to 10. Most preferably, n is in a range of about 1, 2, 3, 4, or 5 to 10, more preferably in a range of about 1, 2, 3, or 4 to 9, in a range of about 1, 2, 3, or 4 to 8, or in a range of about 1, 2, or 3 to 7.

[0205] In this context, the disclosure of WO 2011/026641 and WO 2012/116811 is incorporated herewith by reference. Each of hydrophilic polymers P¹ and P³ typically exhibits at least one —SH-moiety, wherein the at least one —SH-moiety is capable of forming a disulfide linkage upon reaction with component P² or with component (AA) or (AA)ₓ, if used as linker between P¹ and P² or P³ and P² as defined below and optionally with a further component, e.g. L and/or (AA) or (AA)ₓ, e.g. if two or more —SH-moieties are contained. The following subformulae “P¹—S—S—P²” and “P²—S—S—P³” within the generic formula above, wherein any of S, P¹ and P³ are as defined herein, typically represent a situation, wherein one —SH-moiety of hydrophilic polymers P¹ and P³ was condensed with one —SH-moiety of component P² of the generic formula above, wherein both sulphurs of these —SH-moieties form a disulfide bond —S—S—. These —SH-moieties are typically provided by each of the hydrophilic polymers P¹ and P³, e.g. via an internal cysteine or any further (modified) amino acid or compound which carries a —SH moiety. Accordingly, the subformulae “P¹—S—S—P²” and “P²—S—S—P³” may also be written as “P¹—Cys-Cys-P²” and “P²—Cys-Cys-P³”, if the —SH-moiety is provided by a cysteine, wherein the term Cys-Cys represents two cysteines coupled via a disulfide bond, not via a peptide bond. In this case, the term “—S—S—” in these formulae may also be written as “—S-Cys”, as “—Cys-S” or as “—Cys-Cys-”. In this context, the term “—Cys-Cys-” does not represent a peptide bond but a linkage of two cysteines via their —SH-moieties to form a disulfide bond. Accordingly, the term “—Cys-Cys-” also may be understood generally as “—(Cys-S)—(S-Cys)-”, wherein in this specific case S indicates the sulphur of the —SH-moiety of cysteine. Likewise, the terms “—S-Cys” and “—Cys-S” indicate a disulfide bond between a —SH containing moiety and a cysteine, which may also be written as “—S—(S-Cys)” and “—(Cys-S)—S”. Alternatively, the hydrophilic polymers P¹ and P³ may be modified with a —SH moiety, preferably via a chemical reaction with a compound carrying a —SH moiety, such that each of the hydrophilic polymers P¹ and P³ carries at least one such —SH moiety. Such a compound carrying a —SH moiety may be e.g. an (additional) cysteine or any further (modified) amino acid, which carries a —SH moiety. Such a compound may also be any non-amino compound or moiety, which contains or allows to introduce a —SH moiety into hydrophilic polymers P¹ and P³ as defined herein. Such non-amino compounds may be attached to the hydrophilic polymers P¹ and P³ of the polymeric carrier via chemical reactions or binding of compounds, e.g. by binding of a 3-thio propionic acid or thioimolane, by amide formation (e.g. carboxylic acids, sulphonic acids, amines, etc), by Michael addition (e.g maleinimide moieties, unsatured carbonyls, etc), by click chemistry (e.g. azides or alkines), by alkene/alkine methatesis (e.g. alkenes or alkines), imine or hydrozone formation (aldehydes or ketones, hydrazins, hydroxylamins, amines), complexation reactions (avidin, biotin, protein G) or components which allow Sn-type substitution reactions (e.g halogenalkans, thiols, alcohols, amines, hydrazines, hydrazides, sulphonic acid esters, oxyphosphonium salts) or other chemical moieties which can be utilized in the attachment of further components. A particularly preferred PEG derivate in this context is alpha-methoxy-omega-mercapto poly(ethylene glycol). In each case, the SH-moiety, e.g. of a cysteine or of any further (modified) amino acid or compound, may be present at the terminal ends or internally at any position of hydrophilic polymers P¹ and P³. As defined herein, each of hydrophilic polymers P¹ and P³ typically exhibits at least one —SH-moiety preferably at one terminal end, but may also contain two or even more —SH-moieties, which may be used to additionally attach further components as defined herein, preferably further functional peptides or proteins e.g. a ligand, an amino acid component (AA) or (AA)ₓ, antibodies, cell penetrating peptides or enhancer peptides (e.g. TAT, KALA (SEQ ID NO: 1063)), etc.

[0206] As defined above, ligands (L), may be optionally used in the polymeric carrier molecule according to generic formula (VI), e.g. for direction of the inventive carrier polymer and its entire “cargo” (e.g. the isRNA for use in the treatment or prophylaxis of a tumor and/or cancer disease as described herein) into specific cells. They may be selected independent from the other from RGD, Transferrin, Folate, a signal peptide or signal sequence, a localization signal or sequence, a nuclear localization signal or sequence (NLS), an antibody, a cell penetrating peptide (CPP), (e.g. TAT, KALA (SEQ ID NO: 1063)), a ligand of a receptor (e.g. cytokines, hormones, growth factors etc), small molecules (e.g. carbohydrates like mannose or galactose or synthetic ligands), small molecule agonists, inhibitors or antagonists of receptors (e.g. RGD peptidomimetic analogues) or any such molecule as further defined below, etc. Particularly preferred are cell penetrating peptides (CPPs), which induce a pH-mediated conformational change in the endosome and lead to an improved release of the inventive polymeric carrier (in complex with a nucleic acid) from the endosome by insertion into the lipid layer of the liposome. Such called CPPs or cationic peptides for transportation, may include, without being limited thereto protamine, nucleoline, spermine or spermidine, poly-L-lysine (PLL), basic polypeptides, poly-arginine, chimeric CPPs, such as Transportan, or MPG peptides, HIV-binding peptides, Tat, HIV-1 Tat (HIV), Tat-derived peptides, oligoarginines, members of the penetratin family, e.g. Penetratin, Antennapedia-derived peptides (particularly from Drosophila antennapedia), pAntp, pIsl, etc., antimicrobial-derived CPPs e.g. Buforin-2, Bac715-24, SynB, SynB(1), pVEC, hCT-derived peptides, SAP, MAP, PpTG20, proline-rich peptides, Loligomers, arginine-rich peptides, Calcitonin-peptides, FGF, Lactoferrin, poly-L-lysine, poly-arginine, histones, VP22 derived or analog peptides, Pestivirus Erns, HSV, VP22 (Herpes simplex), MAP, KALA (SEQ ID NO: 1063) or protein transduction domains (PTDs, PpT620, proline-rich peptides, arginine-rich peptides, lysine-rich peptides, Pep-1, L-oligomers, Calcitonin peptide(s), etc. Particularly preferred in this context is mannose as ligand to target antigen presenting cells, which typically carry mannose receptors on their cell membrane. In a further preferred embodiment of the present invention, galactose as optional ligand can be used to target hepatocytes. Such ligands may be attached to component P¹ and/or P³ by reversible disulfide bonds as defined below or by any other possible chemical attachement, e.g. by amide formation (e.g. carboxylic acids, sulphonic acids, amines, etc), by Michael addition (e.g. maleinimide moieties, α, β unsatured carbonyls, etc), by click chemistry (e.g. azides or alkines), by alkene/alkine methatesis (e.g. alkenes or alkines), imine or hydrozone formation (aldehydes or ketons, hydrazins, hydroxylamins, amines), complexation reactions (avidin, biotin, protein G) or components which allow Sn-type substitution reactions (e.g halogenalkans, thiols, alcohols, amines, hydrazines, hydrazides, sulphonic acid esters, oxyphosphonium salts) or other chemical moieties which can be utilized in the attachment of further components.

[0207] In the context of formula (VI) of the present invention components P¹ and P³ represent a linear or branched hydrophilic polymer chain, containing at least one —SH-moiety, each P¹ and P³ independently selected from each other, e.g. from polyethylene glycol (PEG), poly-N-(2-hydroxypropyl)methacrylamide, poly-2-(methacryloyloxy)ethyl phosphorylcholines, poly(hydroxyalkyl L-asparagine) or poly(hydroxyalkyl L-glutamine). P¹ and P³ may be identical or different to each other. Preferably, each of hydrophilic polymers P¹ and P³ exhibits a molecular weight of about 1 kDa to about 100 kDa, preferably of about 1 kDa to about 75 kDa, more preferably of about 5 kDa to about 50 kDa, even more preferably of about 5 kDa to about 25 kDa. Additionally, each of hydrophilic polymers P¹ and P³ typically exhibits at least one —SH-moiety, wherein the at least one —SH-moiety is capable to form a disulfide linkage upon reaction with component P² or with component (AA) or (AA)ₓ, if used as linker between P¹ and P² or P³ and P² as defined below and optionally with a further component, e.g. L and/or (AA) or (AA)ₓ, e.g. if two or more —SH-moieties are contained. The following subformulae “P¹—S—S—P²” and “P²—S—S—P³” within generic formula (VI) above (the brackets are omitted for better readability), wherein any of S, P¹ and P³ are as defined herein, typically represent a situation, wherein one —SH— moiety of hydrophilic polymers P¹ and P³ was condensed with one —SH-moiety of component P² of generic formula (VI) above, wherein both sulphurs of these —SH-moieties form a disulfide bond —S—S— as defined herein in formula (VI). These —SH-moieties are typically provided by each of the hydrophilic polymers P¹ and P³, e.g. via an internal cysteine or any further (modified) amino acid or compound which carries a —SH moiety. Accordingly, the subformulae “P¹—S—S—P²” and “P²—S—S—P³” may also be written as “P¹—Cys-Cys-P²” and “P²—Cys-Cys-P³”, if the —SH— moiety is provided by a cysteine, wherein the term Cys-Cys represents two cysteines coupled via a disulfide bond, not via a peptide bond. In this case, the term “—S—S—” in these formulae may also be written as “—S-Cys”, as “—Cys-S” or as “—Cys-Cys-”. In this context, the term “—Cys-Cys-” does not represent a peptide bond but a linkage of two cysteines via their —SH-moieties to form a disulfide bond. Accordingly, the term “—Cys-Cys-” also may be understood generally as “—(Cys-S)—(S-Cys)-”, wherein in this specific case S indicates the sulphur of the —SH-moiety of cysteine. Likewise, the terms “—S-Cys” and “—Cys-S” indicate a disulfide bond between a —SH containing moiety and a cysteine, which may also be written as “—S—(S-Cys)” and “—(Cys-S)—S”. Alternatively, the hydrophilic polymers P¹ and P³ may be modified with a —SH moiety, preferably via a chemical reaction with a compound carrying a —SH moiety, such that each of the hydrophilic polymers P¹ and P³ carries at least one such —SH moiety. Such a compound carrying a —SH moiety may be e.g. an (additional) cysteine or any further (modified) amino acid, which carries a —SH moiety. Such a compound may also be any non-amino compound or moiety, which contains or allows to introduce a —SH moiety into hydrophilic polymers P¹ and P³ as defined herein. Such non-amino compounds may be attached to the hydrophilic polymers P¹ and P³ of formula (VI) of the polymeric carrier according to the present invention via chemical reactions or binding of compounds, e.g. by binding of a 3-thio propionic acid or thioimolane, by amide formation (e.g. carboxylic acids, sulphonic acids, amines, etc), by Michael addition (e.g maleinimide moieties, α, β unsatured carbonyls, etc), by click chemistry (e.g. azides or alkines), by alkene/alkine methatesis (e.g. alkenes or alkines), imine or hydrozone formation (aldehydes or ketones, hydrazins, hydroxylamins, amines), complexation reactions (avidin, biotin, protein G) or components which allow Sn-type substitution reactions (e.g halogenalkans, thiols, alcohols, amines, hydrazines, hydrazides, sulphonic acid esters, oxyphosphonium salts) or other chemical moieties which can be utilized in the attachment of further components. A particularly preferred PEG derivate in this context is alpha-methoxy-omega-mercapto poly(ethylene glycol). In each case, the SH-moiety, e.g. of a cysteine or of any further (modified) amino acid or compound, may be present at the terminal ends or internally at any position of hydrophilic polymers P¹ and P³. As defined herein, each of hydrophilic polymers P¹ and P³ typically exhibits at least one —SH-moiety preferably at one terminal end, but may also contain two or even more —SH-moieties, which may be used to additionally attach further components as defined herein, preferably further functional peptides or proteins e.g. a ligand, an amino acid component (AA) or (AA)ₓ, antibodies, cell penetrating peptides or enhancer peptides (e.g. TAT, KALA (SEQ ID NO: 1063)), etc.

[0208] According to one preferred alternative, such further functional peptides or proteins may comprise so-called cell penetrating peptides (CPPs) or cationic peptides for transportation. Particularly preferred are CPPs, which induce a pH-mediated conformational change in the endosome and lead to an improved release of the inventive polymeric carrier (in complex with a nucleic acid) from the endosome by insertion into the lipid layer of the liposome. Such cell penetrating peptides (CPPs) or cationic peptides for transportation, may include, without being limited thereto protamine, nucleoline, spermine or spermidine, poly-L-lysine (PLL), basic polypeptides, poly-arginine, chimeric CPPs, such as Transportan, or MPG peptides, HIV-binding peptides, Tat, HIV-1 Tat (HIV), Tat-derived peptides, oligoarginines, members of the penetratin family, e.g. Penetratin, Antennapedia-derived peptides (particularly from Drosophila antennapedia), pAntp, pIsl, etc., antimicrobial-derived CPPs e.g. Buforin-2, Bac715-24, SynB, SynB(1), pVEC, hCT-derived peptides, SAP, MAP, PpTG20, proline-rich peptides, Loligomers, arginine-rich peptides, Calcitonin-peptides, FGF, Lactoferrin, poly-L-lysine, poly-arginine, histones, VP22 derived or analog peptides, Pestivirus Ems, HSV, VP22 (Herpes simplex), MAP, KALA (SEQ ID NO: 1063) or protein transduction domains (PTDs, PpT620, prolin-rich peptides, arginine-rich peptides, lysine-rich peptides, Pep-1, L-oligomers, Calcitonin peptide(s), etc.

[0209] According to a further preferred embodiment of the present invention, each of hydrophilic polymers P¹ and P³ of formula (VI) of the polymeric carrier used according to the present invention may also contain at least one further functional moiety, which allows attaching further components as defined herein, e.g. a ligand as defined above, or functionalities which allow the attachment of further components, e.g. by amide formation (e.g. carboxylic acids, sulphonic acids, amines, etc), by Michael addition (e.g maleinimide moieties, unsatured carbonyls, etc), by click chemistry (e.g. azides or alkines), by alkene/alkine methatesis (e.g. alkenes or alkines), imine or hydrozone formation (aldehydes or ketons, hydrazins, hydroxylamins, amines), complexation reactions (avidin, biotin, protein G) or components which allow Sn-type substitution reactions (e.g halogenalkans, thiols, alcohols, amines, hydrazines, hydrazides, sulphonic acid esters, oxyphosphonium salts) or other chemical moieties which can be utilized in the attachment of further components. Further functional moieties may comprise an amino acid component (AA) as defined herein or (AA)ₓ, wherein (AA) is preferably an amino component as defined above. In the above context, x is preferably an integer and may be selected from a range of about 1 to 100, preferably from a range of about 1 to 50, more preferably 1 to 30, and even more preferably selected from a number comprising 1, 2, 3, 4, 5, 6, 7, 8, 9, 10, 11, 12, 13, 14 or 15-30, e.g. from a range of about 1 to 30, from a range of about 1 to 15, or from a number comprising 1, 2, 3, 4, 5, 6, 7, 8, 9, 10, 11, 12, 13, 14 or 15, or may be selected from a range formed by any two of the afore mentioned values. Most preferably, x is 1. Such an amino acid component (AA) or (AA)ₓ may be contained in every part of the inventive polymeric carrier according to formula (VI) above and therefore may be attached to all components of the polymeric carrier according to formula (VI). It is particularly preferred that amino acid component (AA) or (AA)ₓ is present as a ligand or part of the repetitive component [S—P²—S]n within formula (VI) of the polymeric carrier.

[0210] In the context of the entire formula (VI) of the polymeric carrier may be preferably defined as follows:

L-P¹—S—[Cys-P²—Cys]ₙ-S—P³-L

wherein L, P¹, P², P³ and n are as defined herein, S is sulphur and each Cys provides for one —SH-moiety for the disulfide bond.

[0211] According to a particular embodiment, the polymeric carrier according to formula (VI) as defined above, may comprise at least one amino acid component (AA) or (AA)ₓ, as defined above. Such an amino acid component (AA) or (AA)), may be contained in every part of the inventive polymeric carrier according to formula (VI) above and therefore may be attached to all components of the polymeric carrier according to formula (VI). It is particularly preferred that amino acid component (AA) or (AA)ₓ is present as a ligand or part of the repetitive component [S—P2-S]n within formula (VI) of the polymeric carrier. The amino acid component (AA) or (AA)ₓ preferably contains or is flanked (e.g. terminally) by at least one —SH containing moiety, which allows introducing this component (AA) or (AA)ₓ via a disulfide bond into the polymeric carrier according to formula (VI) as defined herein. Such a —SH-containing moiety may be any —SH containing moiety (or, of course, one sulphur of a disulfide bond), e.g. a cysteine residue. In the specific case that the —SH containing moiety represents a cysteine, the amino acid component (AA)ₓ may also be read as —Cys-(AA)ₓ- or -Cys-(AA)ₓ-Cys- wherein Cys represents cysteine and provides for the necessary —SH-moiety for a disulfide bond. The —SH containing moiety may be also introduced into the amino acid component (AA)ₓ using any of modifications or reactions as shown above for components P¹, P² or P³. In the specific case that the amino acid component (AA)ₓ is linked to two components of the polymeric carrier according to formula (VI) it is preferred that (AA) or (AA)ₓ contains at least two —SH-moieties, e.g. at least two cysteines, preferably at its terminal ends. This is particularly preferred if (AA) or (AA)ₓ is part of the repetitive component [S—P2-S]ₙ. Alternatively, the amino acid component (AA) or (AA)ₓ is introduced into the polymeric carrier according to formula (VI) as defined herein via any chemical possible addition reaction. Therefore the amino acid component (AA) or (AA)ₓ contains at least one further functional moiety, which allows attaching same to a further component as defined herein, e.g. component P¹ or P³, P², L, or a further amino acid component (AA) or (AA)ₓ, etc. Such functional moieties may be selected from functionalities which allow the attachment of further components, e.g. functionalities as defined herein, e.g. by amide formation (e.g. carboxylic acids, sulphonic acids, amines, etc), by Michael addition (e.g maleinimide moieties, α, β unsatured carbonyls, etc), by click chemistry (e.g. azides or alkines), by alkene/alkine methatesis (e.g. alkenes or alkines), imine or hydrozone formation (aldehydes or ketons, hydrazins, hydroxylamins, amines), complexation reactions (avidin, biotin, protein G) or components which allow Sn-type substitution reactions (e.g halogenalkans, thiols, alcohols, amines, hydrazines, hydrazides, sulphonic acid esters, oxyphosphonium salts) or other chemical moieties which can be utilized in the attachment of further components.

[0212] The amino acid component (AA) or (AA)ₓ in the polymeric carrier of formula (VI) may also occur as a mixed repetitive amino acid component [(AA)ₓ]_{z}, wherein the number of amino acid components (AA) or (AA)ₓ is further defined by integer z. In this context, z may be selected from a range of about 1 to 30, preferably from a range of about 1 to 15, more preferably 1 to 10 or 1 to 5 and even more preferably selected from a number selected from 1, 2, 3, 4, 5, 6, 7, 8, 9, 10, 11, 12, 13, 14 or 15, or may be selected from a range formed by any two of the afore mentioned values.

[0213] According to a specific and particularly preferred alternative, the amino acid component (AA) or (AA)ₓ, preferably written as S-(AA)ₓ-S or [S-(AA)ₓ-S] may be used to modify component P², particularly the content of component S—P²—S in repetitive component [S—P²—S]n of the polymeric carrier of formula (VI) above. This may be represented in the context of the entire polymeric carrier according to formula (VI) e.g. by following formula (VIa):

L-P¹—S—{[S—P²—S]ₐ[S-(AA)ₓ-S]_{b}}—S—P³-L,

wherein x, S, L, AA, P¹, P² and P³ are preferably as defined herein. In formula (VIa) above, any of the single components [S—P²—S] and [S-(AA)ₓ-S] may occur in any order in the subformula {[S—P²—S]ₐ[S-(AA)ₓ-S]_{b}}. The numbers of single components [S—P²—S] and [S-(AA)ₓ-S] in the subformula {[S—P²—S]ₐ[S-(AA)ₓ-S]_{b}} are determined by integers a and b, wherein a+b=n. n is an integer and is defined as above for formula (VI).

[0214] a is an integer, typically selected independent from integer b from a range of about 1 to 50, preferably from a range of about 1, 2 or 3 to 30, more preferably from a range of about 1, 2, 3, 4, or 5 to 25, or a range of about 1, 2, 3, 4, or 5 to 20, or a range of about 1, 2, 3, 4, or 5 to 15, or a range of about 1, 2, 3, 4, or 5 to 10, including e.g. a range of about 3 to 20, 4 to 20, 5 to 20, or 10 to 20, or a range of about 3 to 15, 4 to 15, 5 to 15, or 10 to 15, or a range of about 6 to 11 or 7 to 10. Most preferably, a is in a range of about 1, 2, 3, 4, or 5 to 10, more preferably in a range of about 1, 2, 3, or 4 to 9, in a range of about 1, 2, 3, or 4 to 8, or in a range of about 1, 2, or 3 to 7.

[0215] b is an integer, typically selected independent from integer a from a range of about 0 to 50 or 1 to 50, preferably from a range of about 0, 1, 2 or 3 to 30, more preferably from a range of about 0, 1, 2, 3, 4, or 5 to 25, or a range of about 0, 1, 2, 3, 4, or 5 to 20, or a range of about 0, 1, 2, 3, 4, or 5 to 15, or a range of about 0, 1, 2, 3, 4, or 5 to 10, including e.g. a range of about 3 to 20, 4 to 20, 5 to 20, or 10 to 20, or a range of about 3 to 15, 4 to 15, 5 to 15, or 10 to 15, or a range of about 6 to 11 or 7 to 10. Most preferably, b is in a range of about 1, 2, 3, 4, or 5 to 10, more preferably in a range of about 1, 2, 3, or 4 to 9, in a range of about 1, 2, 3, or 4 to 8, or in a range of about 1, 2, or 3 to 7.

[0216] In this context, it is particularly preferred that the isRNA for use in the treatment or prophylaxis of a tumor and/or cancer disease as described herein is complexed at least partially with a cationic or polycationic compound and/or a polymeric carrier, preferably cationic proteins or peptides. In this context, the disclosure of WO 2010/037539 and WO 2012/113513 is incorporated herewith by reference. “Partially” in that context means that only a part of the RNA is complexed with a cationic compound and that the rest of the RNA is (preferably comprised in the same formulation) in uncomplexed form (“free”). Preferably the ratio of complexed RNA to free RNA (in the inventive composition) is selected from a range of about 5:1 (w/w) to about 1:10 (w/w), more preferably from a range of about 4:1 (w/w) to about 1:8 (w/w), even more preferably from a range of about 3:1 (w/w) to about 1:5 (w/w) or 1:3 (w/w), and most preferably the ratio of complexed RNA to free RNA in the inventive composition is selected from a ratio of about 1:1 (w/w).

[0217] According to a preferred embodiment, the isRNA for use in the treatment or prophylaxis of a tumor and/or cancer disease as described herein may be complexed with lipids to form one or more liposomes, lipid nanoparticles and/or lipoplexes.

[0218] Lipid-based formulations have been increasingly recognized as one of the most promising delivery systems for RNA due to their biocompatibility and their ease of large-scale production. Cationic lipids have been widely studied as synthetic materials for delivery of RNA. After mixing together, nucleic acids are condensed by cationic lipids to form lipid/nucleic acid complexes known as lipoplexes. These lipid complexes are able to protect genetic material from the action of nucleases and to deliver it into cells by interacting with the negatively charged cell membrane. Lipoplexes can be prepared by directly mixing positively charged lipids at physiological pH with negatively charged nucleic acids.

[0219] Conventional liposomes consist of a lipid bilayer that can be composed of cationic, anionic, or neutral (phospho)lipids and cholesterol, which encloses an aqueous core. Both the lipid bilayer and the aqueous space can incorporate hydrophobic or hydrophilic compounds, respectively. Liposome characteristics and behaviour in vivo can be modified by addition of a hydrophilic polymer coating, e.g. polyethylene glycol (PEG), to the liposome surface to confer steric stabilization. Furthermore, liposomes can be used for specific targeting by attaching ligands (e.g., antibodies, peptides, and carbohydrates) to its surface or to the terminal end of the attached PEG chains (Front Pharmacol. 2015 Dec. 1; 6:286).

[0220] Liposomes are colloidal lipid-based and surfactant-based delivery systems composed of a phospholipid bilayer surrounding an aqueous compartment. They may present as spherical vesicles and can range in size from 20 nm to a few microns. Cationic lipid-based liposomes are able to complex with negatively charged nucleic acids via electrostatic interactions, resulting in complexes that offer biocompatibility, low toxicity, and the possibility of the large-scale production required for in vivo clinical applications. Liposomes can fuse with the plasma membrane for uptake; once inside the cell, the liposomes are processed via the endocytic pathway and the genetic material is then released from the endosome/carrier into the cytoplasm. Liposomes have long been perceived as drug delivery vehicles because of their superior biocompatibility, given that liposomes are basically analogs of biological membranes, and can be prepared from both natural and synthetic phospholipids (Int J Nanomedicine. 2014; 9: 1833-1843).

[0221] Cationic liposomes have been traditionally the most commonly used non-viral delivery systems for oligonucleotides, including plasmid DNA, antisense oligos, and siRNA/small hairpin RNA-shRNA). Cationic lipids, such as DOTAP, (1,2-dioleoyl-3-trimethylammonium-propane) and DOTMA (N-[1-(2,3-dioleoyloxy)propyl]-N,N,N-trimethyl-ammonium methyl sulfate) can form complexes or lipoplexes with negatively charged nucleic acids to form nanoparticles by electrostatic interaction, providing high in vitro transfection efficiency. Furthermore, neutral lipid-based nanoliposomes for RNA delivery as e.g. neutral 1,2-dioleoyl-sn-glycero-3-phosphatidylcholine (DOPC)-based nanoliposomes were developed. (Adv Drug Deliv Rev. 2014 February; 66: 110-116.).

[0222] Therefore, in one embodiment, the isRNA for use in the treatment or prophylaxis of a tumor and/or cancer disease as described herein is complexed with cationic lipids and/or neutral lipids and thereby forms liposomes, lipid nanoparticles, lipoplexes or neutral lipid-based nanoliposomes.

[0223] According to some embodiments, the isRNA for use as described herein is formulated as a lipid formulation. The lipid formulation is preferably selected from, but not limited to, liposomes, lipoplexes, copolymers, such as PLGA, and lipid nanoparticles.

[0224] In one preferred embodiment, a lipid nanoparticle (LNP) comprises:
[0225] (a) a nucleic acid,
[0226] (b) a cationic lipid,
[0227] (c) an aggregation reducing agent (such as polyethylene glycol (PEG) lipid or PEG-modified lipid),
[0228] (d) optionally a non-cationic lipid (such as a neutral lipid), and
[0229] (e) optionally, a sterol.

[0230] In one embodiment, the lipid nanoparticle formulation consists of (i) at least one cationic lipid; (ii) a neutral lipid; (iii) a sterol, e.g., cholesterol; and (iv) a PEG-lipid, in a molar ratio of about 20-60% cationic lipid: 5-25% neutral lipid: 25-55% sterol; 0.5-15% PEG-lipid.

[0231] Cationic Lipids

[0232] The lipid nanoparticle preferably includes a cationic lipid suitable for forming a lipid nanoparticle. Preferably, the cationic lipid carries a net positive charge at about physiological pH.

[0233] The cationic lipid may be, for example, N,N-dioleyl-N,N-dimethylammonium chloride (DODAC), N,N-distearyl-N,N-dimethylammonium bromide (DDAB), 1,2-dioleoyltrimethylammoniumpropane chloride (DOTAP) (also known as N-(2,3-dioleoyloxy)propyl)-N,N,N-trimethylammonium chloride and 1,2-Dioleyloxy-3-trimethylaminopropane chloride salt), N-(1-(2,3-dioleyloxy)propyl)-N,N,N-trimethylammonium chloride (DOTMA), N,N-dimethyl-2,3-dioleyloxy)propylamine (DODMA), 1,2-DiLinoleyloxy-N,N-dimethylaminopropane (DLinDMA), 1,2-Dilinolenyloxy-N,N-dimethylaminopropane (DLenDMA), 1,2-di-y-linolenyloxy-N,N-dimethylaminopropane (γ-DLenDMA), 1,2-Dilinoleylcarbamoyloxy-3-dimethylaminopropane (DLin-C-DAP), 1,2-Dilinoleyoxy-3-(dimethylamino)acetoxypropane (DLin-DAC), 1,2-Dilinoleyoxy-3-morpholinopropane (DLin-MA), 1,2-Dilinoleoyl-3-dimethylaminopropane (DLinDAP), 1,2-Dilinoleylthio-3-dimethylaminopropane (DLin-S-DMA), 1-Linoleoyl-2-linoleyloxy-3-dimethylaminopropane (DLin-2-DMAP), 1,2-Dilinoleyloxy-3-trimethylaminopropane chloride salt (DLin-TMA.Cl), 1,2-Dilinoleoyl-3-trimethylaminopropane chloride salt (DLin-TAP.Cl), 1,2-Dilinoleyloxy-3-(N-methylpiperazino)propane (DLin-MPZ), or 3-(N,N-Dilinoleylamino)-1,2-propanediol (DLinAP), 3-(N,N-Dioleylamino)-1,2-propanedio (DOAP), 1,2-Dilinoleyloxo-3-(2-N,N-dimethylamino)ethoxypropane (DLin-EG-DM A), 2,2-Dilinoleyl-4-dimethylaminomethyl-[1,3]-dioxolane (DLin-K-DMA) or analogs thereof, (3aR,5s,6aS)—N,N-dimethyl-2,2-di((9412Z)-octadeca-9,12-dienyl)tetrahydro-3aH-cyclopenta[d][1,3]dioxol-5-amine, (649428431Z)-heptatriaconta-6,9,28,31-tetraen-19-yl 4-(dimethylamino)butanoate (MC3), 1,1′-(2-(4-(2-((2-(bis(2-hydroxydodecyl)amino)ethyl)(2-hydroxydodecyl)amino)ethyl)piperazin-1-yl)ethylazanediyl)didodecan-2-ol (C12-200), 2,2-dilinoleyl-4-(2-dimethylaminoethyl)-[1,3]-dioxolane (DLin-K-C2-DMA), 2,2-dilinoleyl-4-dimethylaminomethyl-[1,3]-dioxolane (DLin-K-DMA), (649428431Z)-heptatriaconta-6,9,28,31-tetraen-19-yl 4-(dimethylamino) butanoate (DLin-M-C3-DMA), 3-((6Z,9Z,28Z,31Z)-heptatriaconta-6,9,28,3 1-tetraen-19-yloxy)-N,N-dimethylpropan-1-amine (MC3 Ether), 4-((649428431 Z)-heptatriaconta-6,9,28,31-tetraen-19-yloxy)-N,N-dimethylbutan-1-amine (MC4 Ether), or any combination of any of the foregoing. Other cationic lipids include, but are not limited to, N,N-distearyl-N,N-dimethylammonium bromide (DDAB), 3P—(N—(N′,N′-dimethylaminoethane)-carbamoyl)cholesterol (DC-Chol), N-(1-(2,3-dioleyloxy)propyl)-N-2-(sperminecarboxamido)ethyl)-N,N-dimethylammonium trifluoracetate (DOSPA), dioctadecylamidoglycyl carboxyspermine (DOGS), 1,2-dileoyl-sn-3-phosphoethanolamine (DOPE), 1,2-dioleoyl-3-dimethylammonium propane (DODAP), N-(1,2-dimyristyloxyprop-3-yl)-N,N-dimethyl-N-hydroxyethyl ammonium bromide (DMRIE), and 2,2-Dilinoleyl-4-dimethylaminoethyl-[1,3]-dioxolane (XTC). Additionally, commercial preparations of cationic lipids can be used, such as, e.g., LIPOFECTIN (including DOTMA and DOPE, available from GIBCO/BRL), and Lipofectamine (comprising DOSPA and DOPE, available from GIBCO/BRL).

[0234] Other suitable cationic lipids are disclosed in International Publication Nos. WO 09/086558, WO 09/127060, WO 10/048536, WO 10/054406, WO 10/088537, WO 10/129709, and WO 2011/153493; U.S. Patent Publication Nos. 2011/0256175, 2012/0128760, and 2012/0027803; U.S. Pat. No. 8,158,601; and Love et al, PNAS, 107(5), 1864-69, 2010. Other suitable amino lipids include those having alternative fatty acid groups and other dialkylamino groups, including those, in which the alkyl substituents are different (e.g., N-ethyl-N-methylamino-, and N-propyl-N-ethylamino-). In general, amino lipids having less saturated acyl chains are more easily sized, particularly when the complexes must be sized below about 0.3 microns, for purposes of filter sterilization. Amino lipids containing unsaturated fatty acids with carbon chain lengths in the range of C14 to C22 may be used. Other scaffolds can also be used to separate the amino group and the fatty acid or fatty alkyl portion of the amino lipid.

[0235] In a further preferred embodiment, the LNP comprises the cationic lipid with formula (III) according to the patent application PCT/EP2017/064066. In this context, the disclosure of PCT/EP2017/064066 is also incorporated herein by reference.

[0236] In certain embodiments, amino or cationic lipids of the invention have at least one protonatable or deprotonatable group, such that the lipid is positively charged at a pH at or below physiological pH (e.g. pH 7.4), and neutral at a second pH, preferably at or above physiological pH. It will, of course, be understood that the addition or removal of protons as a function of pH is an equilibrium process, and that the reference to a charged or a neutral lipid refers to the nature of the predominant species and does not require that all of the lipid be present in the charged or neutral form. Lipids that have more than one protonatable or deprotonatable group, or which are zwitterionic, are not excluded from use in the invention. In certain embodiments, the protonatable lipids have a pKa of the protonatable group in the range of about 4 to about 11, e.g., a pKa of about 5 to about 7.

[0237] The cationic lipid can comprise from about 20 mol % to about 70 or 75 mol % or from about 45 to about 65 mol % or about 20, 25, 30, 35, 40, 45, 50, 55, 60, 65, or about 70 mol % of the total lipid present in the particle. In another embodiment, the lipid nanoparticles include from about 25% to about 75% on a molar basis of cationic lipid, e.g., from about 20 to about 70%, from about 35 to about 65%, from about 45 to about 65%, about 60%, about 57.5%, about 57.1%, about 50% or about 40% on a molar basis (based upon 100% total moles of lipid in the lipid nanoparticle). In one embodiment, the ratio of cationic lipid to nucleic acid is from about 3 to about 15, such as from about 5 to about 13 or from about 7 to about 11.

[0238] Non-Cationic Lipids

[0239] The non-cationic lipid can be a neutral lipid, an anionic lipid, or an amphipathic lipid. Neutral lipids, when present, can be any of a number of lipid species which exist either in an uncharged or neutral zwitterionic form at physiological pH. Such lipids include, for example, diacylphosphatidylcholine, diacylphosphatidylethanolamine, ceramide, sphingomyelin, dihydrosphingomyelin, cephalin, and cerebrosides. The selection of neutral lipids for use in the particles described herein is generally guided by consideration of, e.g., lipid particle size and stability of the lipid particle in the bloodstream. Preferably, the neutral lipid is a lipid having two acyl groups (e.g. diacylphosphatidylcholine and diacylphosphatidylethanolamine). In one embodiment, the neutral lipids contain saturated fatty acids with carbon chain lengths in the range of C10 to C20. In another embodiment, neutral lipids with mono or diunsaturated fatty acids with carbon chain lengths in the range of C10 to C20 are used. Additionally, neutral lipids having mixtures of saturated and unsaturated fatty acid chains can be used.

[0240] Suitable neutral lipids include, but are not limited to, distearoylphosphatidylcholine (DSPC), dioleoylphosphatidylcholine (DOPC), dipalmitoylphosphatidylcholine (DPPC), dioleoylphosphatidylglycerol (DOPG), dipalmitoylphosphatidylglycerol (DPPG), dioleoyl-phosphatidylethanolamine (DOPE), palmitoyloleoylphosphatidylcholine (POPC), palmitoyloleoylphosphatidylethanolamine (POPE), dioleoyl-phosphatidylethanolamine 4-(N-maleimidomethyl)-cyclohexane-1-carboxylate (DOPE-mal), dipalmitoyl phosphatidyl ethanolamine (DPPE), dimyristoylphosphoethanolamine (DMPE), dimyristoyl phosphatidylcholine (DMPC), distearoyl-phosphatidyl-ethanolamine (DSPE), SM, 16-0-monomethyl PE, 16-O-dimethyl PE, 18-1-trans PE, 1-stearoyl-2-oleoyl-phosphatidyethanolamine (SOPE), cholesterol, or a mixture thereof. Anionic lipids suitable for use in lipid particles of the invention include, but are not limited to, phosphatidylglycerol, cardiolipin, diacylphosphatidylserine, diacylphosphatidic acid, N-dodecanoyl phosphatidylethanoloamine, N-succinyl phosphatidylethanolamine, N-glutaryl phosphatidylethanolamine, lysylphosphatidylglycerol, and other anionic modifying groups joined to neutral lipids.

[0241] The non-cationic lipid can be from about 5 mol % to about 90 mol %, about 5 mol % to about 10 mol %, about 5, 10, 15, 20, 25, 30, 35, 40, 45, 50, 55, 60, 65, 70, 75, 80, 85, or about 90 mol % of the total lipid present in the particle. In one embodiment, the lipid nanoparticles include from about 0% to about 15 or 45% on a molar basis of neutral lipid, e.g., from about 3 to about 12% or from about 5 to about 10%. For instance, the lipid nanoparticles may include about 15%, about 10%, about 7.5%, or about 7.1% of neutral lipid on a molar basis (based upon 100% total moles of lipid in the lipid nanoparticle).

[0242] Sterols

[0243] A preferred sterol is cholesterol. The sterol can be about 10 mol % to about 60 mol % or about 25 mol % to about 40 mol % of the lipid particle. In one embodiment, the sterol is about 10, 15, 20, 25, 30, 35, 40, 45, 50, 55, or about 60 mol % of the total lipid present in the lipid particle. In another embodiment, the lipid nanoparticles include from about 5% to about 50% on a molar basis of the sterol, e.g., about 15% to about 45%, about 20% to about 40%, about 48%, about 40%, about 38.5%, about 35%, about 34.4%, about 31.5% or about 31% on a molar basis (based upon 100% total moles of lipid in the lipid nanoparticle).

[0244] Aggregation Reducing Agent

[0245] The aggregation reducing agent can be a lipid capable of reducing aggregation. Examples of such lipids include, but are not limited to, polyethylene glycol (PEG)-modified lipids, monosialoganglioside Gml, and polyamide oligomers (PAO) such as those described in U.S. Pat. No. 6,320,017, which is incorporated by reference in its entirety. Other compounds with uncharged, hydrophilic, steric-barrier moieties, which prevent aggregation during formulation, like PEG, Gml or ATTA, can also be coupled to lipids. ATTA-lipids are described, e.g., in U.S. Pat. No. 6,320,017, and PEG-lipid conjugates are described, e.g., in U.S. Pat. Nos. 5,820,873, 5,534,499 and 5,885,613, each of which is incorporated by reference in its entirety.

[0246] The aggregation reducing agent may be, for example, a polyethyleneglycol (PEG)-lipid including, without limitation, a PEG-diacylglycerol (DAG), a PEG-dialkylglycerol, a PEG-dialkyloxypropyl (DAA), a PEG-phospholipid, a PEG-ceramide (Cer), or a mixture thereof (such as PEG-Cerl4 or PEG-Cer20). The PEG-DAA conjugate may be, for example, a PEG-dilauryloxypropyl (C12), a PEG-dimyristyloxypropyl (C14), a PEG-dipalmityloxypropyl (C16), or a PEG-distearyloxypropyl (C18). Other pegylated-lipids include, but are not limited to, polyethylene glycol-didimyristoyl glycerol (C14-PEG or PEG-C14, where PEG has an average molecular weight of 2000 Da) (PEG-DMG); (R)-2,3-bis(octadecyloxy)propyl-1-(methoxy poly(ethylene glycol)2000)propylcarbamate) (PEG-DSG); PEG-carbamoyl-1,2-di myristyloxypropyla mine, in which PEG has an average molecular weight of 2000 Da (PEG-cDMA); N-Acetylgalactosamine-aR)-2,3-bis(octadecyloxy)propyl-1-(methoxy poly(ethylene glycol)2000)propylcarba mate)) (GaINAc-PEG-DSG); mPEG (mw2000)-diastearoylphosphatidyl-ethanolamine (PEG-DSPE); and polyethylene glycol-dipalmitoylglycerol (PEG-DPG). In one embodiment, the aggregation reducing agent is PEG-DMG. In another embodiment, the aggregation reducing agent is PEG-c-DMA.

[0247] The average molecular weight of the PEG moiety in the PEG-modified lipids can range from about 500 to about 8,000 Daltons (e.g., from about 1,000 to about 4,000 Daltons). In one preferred embodiment, the average molecular weight of the PEG moiety is about 2,000 Daltons.

[0248] The concentration of the aggregation reducing agent may range from about 0.1 to about 15 mol %, based upon the 100% total moles of lipid in the lipid particle. In one embodiment, the formulation includes less than about 3, 2, or 1 mole percent of PEG or PEG-modified lipid, based upon the total moles of lipid in the lipid particle. In another embodiment, the lipid nanoparticles include from about 0.1% to about 20% on a molar basis of the PEG-modified lipid, e.g., about 0.5 to about 10%, about 0.5 to about 5%, about 10%, about 5%, about 3.5%, about 1.5%, about 0.5%, or about 0.3% on a molar basis (based on 100% total moles of lipids in the lipid nanoparticle).

[0249] According to a preferred embodiment, the isRNA for use in the treatment or prophylaxis of a tumor and/or cancer disease as described herein is formulated by using the isRNA as described herein and one or more liposomes, lipoplexes, or lipid nanoparticles. In one embodiment, the inventive composition comprises liposomes. Liposomes typically are artificially-prepared vesicles, which may primarily be composed of a lipid bilayer and may be used as a delivery vehicle for the administration of nutrients and pharmaceutical formulations. Liposomes can be of different sizes such as, but not limited to, a multilamellar vesicle (MLV) which may be hundreds of nanometers in diameter and may contain a series of concentric bilayers separated by narrow aqueous compartments, a small unicellular vesicle (SUV) which may be smaller than 50 nm in diameter, and a large unilamellar vesicle (LUV) which may be between 50 and 500 nm in diameter. Liposome design may include, but is not limited to, opsonins or ligands in order to improve the attachment of liposomes to unhealthy tissue or to activate events such as, but not limited to, endocytosis. Liposomes may contain a low or a high pH in order to improve the delivery of the isRNA for use in the treatment or prophylaxis of a tumor and/or cancer disease as described herein, in particular when applied as a pharmaceutical composition as described herein.

[0250] Lipid Nanoparticles (LNPs)

[0251] Preferably, lipid nanoparticles may have the structure of a liposome. A liposome is typically a structure having lipid-containing membranes enclosing an aqueous interior. Liposomes preferably have one or more lipid membranes. In preferred embodiments, liposomes can be single-layered, referred to as unilamellar, or multi-layered, referred to as multilamellar. When complexed with nucleic acids (e.g. RNA), lipid particles may also be lipoplexes, which are preferably composed of cationic lipid bilayers sandwiched between nucleic acid layers. Liposomes can further be of different sizes such as, but not limited to, a multilamellar vesicle (MLV) which may be hundreds of nanometers in diameter and may contain a series of concentric bilayers separated by narrow aqueous compartments, a small unicellular vesicle (SUV) which may be smaller than 50 nm in diameter, and a large unilamellar vesicle (LUV) which may be between 50 and 500 nm in diameter. In certain embodiments, liposome design may include, but is not limited to, opsonins or ligands in order to improve the attachment of liposomes to unhealthy tissue or to activate events such as, but not limited to, endocytosis. Liposomes may contain a low (e.g. an acidic) or a high (e.g. a basic) pH in order to improve the delivery of the pharmaceutical formulations.

[0252] As a non-limiting example, liposomes such as synthetic membrane vesicles may be prepared by the methods, apparatus and devices described in US Patent Publication No. US20130177638, US20130177637, US20130177636, US20130177635, US20130177634, US20130177633, US20130183375, US20130183373 and US20130183372, the contents of each of which are herein incorporated by reference in their entirety. In preferred embodiments, the nucleic acid (e.g. an RNA as described herein) may be encapsulated by the liposome, and/or it may be contained in an aqueous core, which may then be encapsulated by the liposome (see International Pub. Nos. WO2012031046, WO2012031043, WO2012030901 and WO2012006378 and US Patent Publication No. US20130189351, US20130195969 and US20130202684; the contents of each of which are herein incorporated by reference in their entirety).

[0253] In another embodiment, the lipid nanoparticles have a median diameter size of from about 50 nm to about 300 nm, such as from about 50 nm to about 250 nm, for example, from about 50 nm to about 200 nm. In another embodiment, nucleic acids may be delivered using smaller LNPs which may comprise a diameter from about 1 nm to about 100 nm, from about 1 nm to about 10 nm, about 1 nm to about 20 nm, from about 1 nm to about 30 nm, from about 1 nm to about 40 nm, from about 1 nm to about 50 nm, from about 1 nm to about 60 nm, from about 1 nm to about 70 nm, from about 1 nm to about 80 nm, from about 1 nm to about 90 nm, from about 5 nm to about from 100 nm, from about 5 nm to about 10 nm, about 5 nm to about 20 nm, from about 5 nm to about 30 nm, from about 5 nm to about 40 nm, from about 5 nm to about 50 nm, from about 5 nm to about 60 nm, from about 5 nm to about 70 nm, from about 5 nm to about 80 nm, from about 5 nm to about 90 nm, about 10 to about 50 nM, from about 20 to about 50 nm, from about 30 to about 50 nm, from about 40 to about 50 nm, from about 20 to about 60 nm, from about 30 to about 60 nm, from about 40 to about 60 nm, from about 20 to about 70 nm, from about 30 to about 70 nm, from about 40 to about 70 nm, from about 50 to about 70 nm, from about 60 to about 70 nm, from about 20 to about 80 nm, from about 30 to about 80 nm, from about 40 to about 80 nm, from about 50 to about 80 nm, from about 60 to about 80 nm, from about 20 to about 90 nm, from about 30 to about 90 nm, from about 40 to about 90 nm, from about 50 to about 90 nm, from about 60 to about 90 nm, from about 70 to about 80 nm, and/or from about 70 to about 90 nm.

[0254] In one embodiment, the weight ratio of lipid to RNA is at least about 0.5:1, at least about 1:1, at least about 2:1, at least about 3:1, at least about 4:1, at least about 5:1, at least about 6:1, at least about 7:1, at least about 11:1, at least about 20:1, at least about 25:1, at least about 27:1, at least about 30:1, or at least about 33:1. In one embodiment, the weight ratio of lipid to RNA is from about 1:1 to about 35:1, about 3:1 to about 15:1, about 4:1 to about 15:1, or about 5:1 to about 13:1 or about 25:1 to about 33:1. In one embodiment, the weight ratio of lipid to RNA is from about 0.5:1 to about 12:1.

[0255] According to a preferred embodiment, the isRNA for use in the treatment or prophylaxis of a tumor and/or cancer disease as described herein is administered/applied intratumorally (i.t.), locoregionally or peritumorally. As used herein, the term, intratumoral administration/application” refers to the direct delivery of a pharmaceutically active ingredient, such as the isRNA as described herein, e.g. in the form of a composition/formulation comprising the isRNA as described herein, into a tumor, adjacent to a tumor, and/or to the immediate vicinity of a tumor (peritumorally). Said delivery may be achieved by several methods known in the art, comprising but not limited to injection (such as conventional needle injection or needle-free injection, e.g. jet injection) or electroporation or combinations thereof. Methods for intratumoral delivery of drugs are described in the art (see, for instance, Brincker, 1993. Crit. Rev. Oncol. Hematol. 15(2):91-8; Celikoglu et al., 2008. Cancer Therapy 6, 545-552).

[0256] As used herein, the term ‘intratumoral’ may also refer to the administration of an active pharmaceutical ingredient to an organ bearing a tumor or cancer, or to a tissue bearing a tumor or cancer. Accordingly, the term ‘intratumoral’ as used herein may also comprise peritumoral or locoregional administration, wherein an active pharmaceutical ingredient is preferably administered to an organ or tissue proximal to the tumor or cancer, preferably to an organ or tissue, which is in direct physical contact with the tumor or cancer. In the context of the present invention, intratumoral, locoregional or peritumoral administration preferably comprises delivery (i.e. by injection) of an active pharmaceutical ingredient to a superficial tumor or cancer, or to a tumor or cancer, which is located inside of a tissue.

[0257] In some embodiments, locoregional administration of an active pharmaceutical ingredient (such as the RNA described herein) comprises delivering the active pharmaceutical ingredient to a tumor or cancer or to a tissue or organ bearing a tumor or cancer by administering the active pharmaceutical ingredient to a blood vessel (e.g. an artery, such as the liver artery, or a vein, such as the pulmonary vein) that carries the blood to the tumor or cancer or to the tissue or organ bearing the tumor or cancer.

[0258] According to a preferred embodiment, a pharmaceutically active ingredient, such as the isRNA for use in the treatment or prophylaxis of a tumor and/or cancer disease as described herein is administered intratumorally (i.t.), including locoregionally or peritumorally, wherein the administration comprises an injection technique. Therein, a pharmaceutically active ingredient, such as the isRNA for use as described herein, may preferably be injected in a single dose per treatment. Alternatively, multiple injections into the same or separate regions of the tumor or cancer or the tumor bearing organ or tissue are also envisaged. Furthermore, intratumoral administration/application includes delivery of a pharmaceutically active ingredient into one or more metastases, preferably via injection. Administration of the pharmaceutically active ingredient may be performed as single dose or repeat dose treatment with various treatment intervals, preferably as described herein.

[0259] In a preferred embodiment, a pharmaceutically active ingredient, such as the isRNA for use in the treatment or prophylaxis of a tumor and/or cancer disease as described herein is administered intratumorally, including locoregionally or peritumorally, by injection. Preferably, the intratumoral administration involves an imaging technique, which preferably enhances the precision of the administration. More preferably, such imaging technique is selected from the group consisting of computer tomograpy, ultrasound, gamma camera imaging, positron emission tomography and magnetic resonance tumor imaging. Furthermore, the intratumoral administration may preferably comprise direct intratumoral injection, which preferably involves at least one of the procedures selected from the group consisting of endoscopy, bronchoscopy, cystoscopy, colonoscopy, laparoscope and catheterization.

[0260] In a preferred embodiment, a pharmaceutically active ingredient, such as the isRNA for use in the treatment or prophylaxis of a tumor and/or cancer disease as described herein is administered locoregionally by injection. Preferably, the locoregional administration involves an imaging technique, which preferably enhances the precision of the administration, which is preferably an intratumoral or peritumoral administration as described herein. More preferably, such imaging technique is selected from the group consisting of computer tomograpy, ultrasound, gamma camera imaging, positron emission tomography and magnetic resonance tumor imaging. Furthermore, the locoregional administration may preferably comprise direct locoregional injection, which preferably involves at least one of the procedures selected from the group consisting of endoscopy, bronchoscopy, cystoscopy, colonoscopy, laparoscope and catheterization. As used herein, the term locoregional administration′ may thus also refer to intratumoral or peritumoral administration, preferably injection, of a pharmaceutically active ingredient (e.g. an RNA as described herein), wherein the administration preferably involves an imaging technique, wherein the imaging technique preferably comprises at least one of the procedures selected from the group consisting of endoscopy, bronchoscopy, cystoscopy, colonoscopy, laparoscope and catheterization.

[0261] According to a preferred embodiment, the invention provides an isRNA for use in the treatment of a tumor or cancer disease,

[0262] wherein the isRNA comprises a nucleic acid sequence according to formula (I) (GₗXₘGₙ), formula (II) (CₗXₘCₙ), formula (III) (NᵤGₗXₘGₙNᵥ)ₐ or formula (IV) (NᵤCₗXₘCₙNᵥ)ₐ, preferably at least one nucleic acid sequence according to any one of SEQ ID NOs: 433 to 437 or 1014 to 1016, or a fragment or variant of any one of these sequences, more preferably according to any one of SEQ ID NOs: 433, 434, or 1014 to 1016, or a fragment or a variant of any one of these nucleic acid sequences,

[0263] wherein the isRNA is complexed with a cationic or polycationic compound, preferably with a polymeric carrier, more preferably with a polymeric carrier that is formed by a disulfide-crosslinked cationic component, which preferably comprises a peptide according to formula (V), (Va) and/or (Vb) and/or a compound according to formula (VI) (L-P1-S—[S—P2-S]ₙ—S—P3-L), more preferably at least one of the disulfide-crosslinked cationic peptides Cys-Arg₁₂ (SEQ ID NO: 580), Cys-Arg₁₂-Cys (SEQ ID NO: 579), or Trp-Arg₁₂-Cys (SEQ ID NO: 1074) and wherein the isRNA is preferably administered intratumorally.

[0264] According to a particularly preferred embodiment, the invention provides an isRNA for use in the treatment of a tumor or cancer disease,

[0265] wherein the isRNA comprises a nucleic acid sequence according to formula (I) (GₗXₘGₙ), formula (II) (CₗXₘCₙ), formula (III) (NᵤGₗXₘGₙNᵥ)ₐ or formula (IV) (NᵤCₗXₘCₙNᵥ)ₐ, preferably at least one nucleic acid sequence according to any one of SEQ ID NOs: 433 to 437, 1014 to 1016, or a fragment or variant of any one of these sequences, more preferably according to any one of SEQ ID NOs: 433, 434, or 1014 to 1016, or a fragment or a variant of any one of these nucleic acid sequences,

[0266] wherein the isRNA is complexed with a cationic or polycationic compound, preferably with a polymeric carrier, more preferably with a polymeric carrier that is formed by a disulfide-crosslinked cationic component, which preferably comprises a peptide according to formula (V), (Va) and/or (Vb) and/or a compound according to formula (VI) (L-P¹—S—[S—P2-S]ₙ—S—P3-L), more preferably at least one of the disulfide-crosslinked cationic peptides Cys-Arg₁₂ (SEQ ID NO: 580), Cys-Arg₁₂-Cys (SEQ ID NO: 579), or Trp-Arg₁₂-Cys (SEQ ID NO: 1074), wherein the isRNA is preferably administered intratumorally, and

[0267] wherein the tumor or cancer disease is preferably selected from the group consisting of melanoma, preferably advanced and/or metastatic melanoma; squamous cell cancer of the skin (SCC), preferably unresectable and/or advanced SCC; adenocystic carcinoma (ACC), preferably advanced ACC; cutaneous T-cell lymphoma, preferably advanced cutaneous T-cell lymphoma refractory to local treatment or to chemotherapy; and head and neck cancer (HNSCC), preferably advanced HNSCC. In this context, the tumor or cancer disease is preferably selected from the group consisting of advanced melanoma, preferably advanced cutaneous melanoma (cMEL), squamous cell carcinoma of the skin (SCC), preferably cutaneous squamous cell carcinoma (cSCC), squamous cell carcinoma of the head and neck (HNSCC), and adenoid cystic carcinoma (adenocystic carcinoma (ACC)).

[0268] In an alternative preferred embodiment, the tumor or the cancer disease is selected from the group consisting of advanced cutaneous melanoma (cMEL), cutaneous squamous cell carcinoma (cSCC), head and neck squamous cell carcinoma (hnSCC), and adenoid cystic carcinoma (ACC).

[0269] According to a particularly preferred embodiment, the invention provides an isRNA for use in the treatment of a tumor or cancer disease,

[0270] wherein the isRNA comprises a nucleic acid sequence according to formula (I) (GₗXₘGₙ), formula (II) (CₗXₘCₙ), formula (III) (NᵤGₗXₘGₙNᵥ)ₐ or formula (IV) (NᵤCₗXₘCₙNᵥ)ₐ, preferably at least one nucleic acid sequence according to any one of SEQ ID NOs: 433 to 437, 1014 to 1016, or a fragment or variant of any one of these sequences, more preferably according to any one of SEQ ID NOs: 433, 434; 1014 to 1016, or a fragment or a variant of any one of these nucleic acid sequences,

[0271] wherein the isRNA is complexed with a cationic or polycationic compound, preferably with a polymeric carrier, more preferably with a polymeric carrier that is formed by a disulfide-crosslinked cationic component, which preferably comprises a peptide according to formula (V), (Va) and/or (Vb) and/or a compound according to formula (VI) (L-P¹—S—[S—P2-S]ₙ—S—P3-L), more preferably at least one of the disulfide-crosslinked cationic peptides Cys-Arg₁₂ (SEQ ID NO: 580), Cys-Arg₁₂-Cys (SEQ ID NO: 579), or Trp-Arg₁₂-Cys (SEQ ID NO: 1074),

[0272] wherein the isRNA is preferably administered intratumorally, and

[0273] wherein the tumor or cancer disease is preferably selected from the group consisting of melanoma, preferably advanced and/or metastatic melanoma, more preferably advanced cutaneous melanoma (cMEL);
[0274] squamous cell cancer (SCC) of the skin, preferably unresectable and/or advanced SCC of the skin, more preferably cutaneous squamous cell carcinoma (cSCC), even more preferably unresectable and/or advanced cSCC;
[0275] squamous cell carcinoma of the head and neck (HNSCC), preferably advanced HNSCC, more preferably immunotherapy-refractory or platinum-refractory HNSCC, even more preferably immunotherapy-refractory advanced HNSCC or platinum-refractory advanced HNSCC;
[0276] adenocystic carcinoma (ACC), preferably advanced ACC;
[0277] cutaneous T-cell lymphoma, preferably advanced cutaneous T-cell lymphoma or cutaneous T-cell lymphoma of mycosis fungoides subtype, more preferably cutaneous T-cell lymphoma refractory to local treatment or to chemotherapy, even more preferably advanced cutaneous T-cell lymphoma refractory to local treatment or to chemotherapy, or cutaneous T-cell lymphoma of mycosis fungoides subtype refractory to local treatment or to chemotherapy, and
[0278] vulvar cancer, preferably vulvar squamous cell cancer (VSCC), more preferably advanced VSCC, even more preferably VSCC refractory to surgery or chemotherapy, most preferably advanced VSCC refractory to surgery or chemotherapy; or

[0279] wherein the tumor or the cancer disease is preferably selected from the group consisting of cutaneous melanoma (cMEL), cutaneous squamous cell carcinoma (cSCC), head and neck squamous cell carcinoma (HNSCC), adenoid cystic carcinoma (ACC), cutaneous T-cell lymphoma, preferably cutaneous T-cell lymphoma of mycosis fungoides subtype, and vulvar squamous cell cancer (VSCC);

[0280] wherein the tumor or the cancer disease is preferably at an advanced stage and/or refractory to standard therapy.

[0281] In certain embodiments, the isRNA as described herein is provided for use in the treatment of a tumor or cancer disease, preferably as defined herein, wherein the treatment comprises administration of at least one additional pharmaceutically active ingredient and wherein the isRNA is preferably administered intratumorally, including peritumorally or locoregionally, preferably as described herein. In particular, the present invention provides the isRNA for use in the treatment or prophylaxis of a tumor or cancer disease as described herein, wherein the treatment comprises administration of at least one additional pharmaceutically active ingredient that is conventionally used in the treatment and/or prophylaxis of a tumor or cancer disease, preferably as described herein and wherein the isRNA is preferably administered intratumorally, including peritumorally or locoregionally. In the context of the present invention, the phrase ‘pharmaceutically active ingredient that is conventionally used in the treatment and/or prophylaxis of a [tumor or cancer disease]’ preferably refers to a pharmaceutically active ingredient that is used—preferably according to standard therapy—in the treatment and/or prophylaxis of a tumor or cancer disease. More preferably, the phrase comprises a pharmaceutically active ingredient that is known in the art to be suitable for treatment and/or prophylaxis of a tumor or cancer disease.

[0282] According to a preferred embodiment, the isRNA is provided for use in the treatment of a tumor or cancer disease as described herein, wherein the treatment comprises administration of at least one additional pharmaceutically active ingredient that is conventionally used in the treatment and/or prophylaxis of the respective disease and wherein the isRNA is preferably administered intratumorally.

[0283] Even more preferably, the isRNA is provided for use in the treatment of a tumor or cancer disease selected from the group consisting of melanoma, preferably advanced and/or metastatic melanoma, most preferably advanced cutaneous melanoma (cMEL), squamous cell cancer of the skin (SCC), preferably unresectable and/or advanced SCC; most preferably preferably cutaneous squamous cell carcinoma (cSCC); adenocystic carcinoma (ACC), preferably advanced ACC; cutaneous T-cell lymphoma, preferably advanced cutaneous T-cell lymphoma refractory to local treatment or to chemotherapy; and squamous cell carcinoma of the head and neck (HNSCC), preferably advanced HNSCC, wherein the treatment comprises concomitant localized or systemic administration of at least one additional pharmaceutically active ingredient that is conventionally used in the treatment and/or prophylaxis of any of these diseases and wherein the isRNA is preferably administered intratumorally.

[0284] According to a preferred embodiment, the isRNA is provided for use in the treatment of a tumor or cancer disease selected from the group consisting of
[0285] melanoma, preferably advanced and/or metastatic melanoma, more preferably advanced cutaneous melanoma (cMEL);
[0286] squamous cell cancer (SCC) of the skin, preferably unresectable and/or advanced SCC of the skin, more preferably cutaneous squamous cell carcinoma (cSCC), even more preferably unresectable and/or advanced cSCC;
[0287] squamous cell carcinoma of the head and neck (HNSCC), preferably advanced HNSCC, more preferably immunotherapy-refractory or platinum-refractory HNSCC, even more preferably immunotherapy-refractory advanced HNSCC or platinum-refractory advanced HNSCC;
[0288] adenocystic carcinoma (ACC), preferably advanced ACC;
[0289] cutaneous T-cell lymphoma, preferably advanced cutaneous T-cell lymphoma or cutaneous T-cell lymphoma of mycosis fungoides subtype, more preferably cutaneous T-cell lymphoma refractory to local treatment or to chemotherapy, even more preferably advanced cutaneous T-cell lymphoma refractory to local treatment or to chemotherapy, or cutaneous T-cell lymphoma of mycosis fungoides subtype refractory to local treatment or to chemotherapy, and
[0290] vulvar cancer, preferably vulvar squamous cell cancer (VSCC), more preferably advanced VSCC, even more preferably VSCC refractory to surgery or chemotherapy, most preferably advanced VSCC refractory to surgery or chemotherapy; or

[0291] for use in the treatment of a tumor or cancer disease selected from the group consisting of cutaneous melanoma (cMEL), cutaneous squamous cell carcinoma (cSCC), head and neck squamous cell carcinoma (HNSCC), adenoid cystic carcinoma (ACC), cutaneous T-cell lymphoma, preferably cutaneous T-cell lymphoma of mycosis fungoides subtype, and vulvar squamous cell cancer (VSCC);

[0292] wherein the tumor or the cancer disease is preferably at an advanced stage and/or refractory to standard therapy, wherein the treatment comprises concomitant localized or systemic administration of at least one additional pharmaceutically active ingredient that is conventionally used in the treatment and/or prophylaxis of any of these diseases and wherein the isRNA is preferably administered intratumorally.

[0293] The at least one additional pharmaceutically active ingredient may be administered by any suitable administration route or technique, preferably as described herein, or by intravenous, oral or local/topical application. In a preferred embodiment, the isRNA as well as the at least one additional pharmaceutically active ingredient are administered intratumorally. In a more preferred embodiment, the isRNA is administered intratumorally and at least one additional pharmaceutically active ingredient is administered systemically (oral or intravenous or subcutaneous or intramuscular or intraperitoneal or intradermal).

[0294] In some embodiments, the at least one additional pharmaceutically active ingredient is formulated together with the isRNA for use as described herein. In a particularly preferred embodiment, the at least one additional pharmaceutically active ingredient is formulated separately from the isRNA for use as described herein.

[0295] The at least one additional pharmaceutically active ingredient is not limited to a particular class of compounds. For example, the at least one additional pharmaceutically active ingredient may preferably be a compound, which is conventionally used in chemotherapy of the tumor or cancer disease, for which the isRNA as described herein is used. Preferably, the at least one additional pharmaceutically active ingredient is a compound as described herein for use in combination with the isRNA as described herein. Alternatively, the at least one additional pharmaceutically active ingredient may preferably be a therapeutic peptide or protein (e.g. an antibody or a decoy receptor) or a fragment or variant thereof.

[0296] In some embodiments, the at least one additional pharmaceutically active ingredient is a compound, which is conventionally used in the treatment and/or prophylaxis of melanoma, preferably advanced and/or metastatic melanoma and most preferably advanced cMEL, wherein the compound is preferably selected from the group consisting of Nivolumab (Opdivo), Ipilimumab (Winglore, Yervoy), Pembrolizumab (Keytruda), dabrafenib mesylate+trametinib dimethyl sulfoxide (Tafinlar+Mekinist), temozolomide (Astromide, Temodal, Temozolomide), vemurafenib (Zelboraf), peginterferon alfa-2b (Pegintron), aldesleukin (Proleukin), bleomycin sulfate (Bleo, Bleoprim), carboplatin (Paraplatin), carmustine (Becenun, Bicnu), cisplatin (Platinol, Cisplatin, Displanor, Nuoxin), cobimetinib fumarate (Cotellic), cyclophosphamide (Endoxan), dabrafenib mesylate (Tafinlar), dacarbazine (Dacarbazine, DBL Dacarbazine, DTIC, DTIC-Dome, Dacarbazina Mayne, Dacarbazine, Dacarbazina, Detimedac, Dacarb, Celdaz, Dabaz, Dacarzine, Dacarin, Dacmed, Oncodac, Dti, Dacarbazine Sandoz, Fauldacar, Dacarex, Daczin, Arzi, Tiferomed, Acocarb, DTI, Evodazin), dactinomycin (Cosmegen, Kosmegen, Lyovac Cosmegen), diphenidol hydrochloride (Bleocina, Raamfen, Dimensal), epirubicin hydrochloride (Pharmorubicin), fotemustine (Muphoran, Mustoforan, Mustophoran, Fotemustine), hydroxyurea (Hydrine, Durea, Myelostat, Riborea, Unidrea, Hydran, Leukocel, Hydroxyurea, Hydrea, hydroxyurea), interferon alfa (Alfanative, Immunex), interferon alfa-2a (Intermax Alpha, Inron-A, Intefen, Viteron-A, Roferon A, Alferon), interferon alfa-2b (Realfa-2B, Shanferon, Intron A, Viraferon, Alfaron, Lemoron, Liveral, Recombinant Human Interferon alfa-2b, ReliFeron, Fni 2B, Infostat, Altevir, Lanstion, interferon beta (Feron), interleukin-2 (Inleusin, Recombinant Human Interleukin-2), irinotecan hydrochloride (Camptolem), lomustine (Belustine, Lomustine, Moostin), melanoma lysate vaccine (Melacine), melphalan (Alkacel, Alkeran, Melphalan), methotrexate (Methotrexate), nivolumab+ipilimumab (Opdivo+Yervoy), Sylatron (Pegintron, Sylatron), talimogene laherparepvec (Imlygic), tamoxifen citrate (Tamoxifen), temozolomide (Emzolam, Temozolomide, Temozolomide LW, Tiloshil, Temolida, Temozod, Temozolomide, Temizole), trametinib dimethyl sulfoxide (Mekinist), vincristine sulfate (Oncovin, Vincristine Sulfate, Vincristine, Fauldvincri, Eldisine), (mequinol+tretinoin) (Solage), Dacarbazine (Dacarbazine), interferon alfa (Biaferone, Isiferone), cisplatin; dacarbazine; vindesine sulfate, fibrin, sealant, tremelimumab, interferon alfa-2b, recombinant interferon alfa, imiquimod, etanercept, sorafenib tosylate; sun itinib malate, aldesleukin, imatinib mesylate; nilotinib, sargramostim, aldesleukin, ipilimumab; sargramostim, ipilimumab, pasireotide, aldesleukin; ipilimumab, vemurafenib, melphalan, cetuximab; cisplatin; cyclophosphamide; dacarbazine; docetaxel; doxorubicin; etoposide; fluorouracil; gemcitabine hydrochloride; irinotecan hydrochloride; oxaliplatin; paclitaxel; pemetrexed disodium; temozolomide, interferon alfa-2b; Sylatron, bleomycin, talimogene laherparepvec, dabrafenib mesylate; dabrafenib mesylate+trametinib dimethyl sulfoxide; trametinib dimethyl sulfoxide; vemurafenib, trametinib dimethyl sulfoxide, dabrafenib mesylate; trametinib dimethyl sulfoxide, dabrafenib mesylate, granulocyte macrophage colony stimulating factor; ipilimumab, bleomycin; undisclosed chemotherapy, ipilimumab; vemurafenib, nivolumab, bortezomib; cabozantinib s-malate; ceritinib; crizotinib; dasatinib; erlotinib hydrochloride; everolimus; gefitinib; imatinib; lapatinib ditosylate; nilotinib; olaparib; palbociclib; pazopanib hydrochloride; ramucirumab; regorafenib; sorafenib tosylate; sunitinib malate; trametinib dimethyl sulfoxide; vorinostat, bortezomib; cabozantinib s-malate; ceritinib; crizotinib; dasatinib; erlotinib hydrochloride; everolimus; gefitinib; imatinib; lapatinib ditosylate; nilotinib; olaparib; palbociclib; pazopanib hydrochloride; ramucirumab; regorafenib; sorafenib tosylate; sunitinib malate; trametinib dimethyl sulfoxide; vorinostat, aminolevulinic acid hydrochloride, dabrafenib mesylate; vemurafenib, pembrolizumab, GSK-2132231A, fotemustine, M-Vax, melphalan; tumor necrosis factor alfa, Canvaxin, aldesleukin; tumor infiltrating lymphocytes, interferon alfa-2a, talimogene laherparepvec, aldesleukin; cisplatin; dacarbazine; filgrastim; interferon alfa; vinblastine, velimogene aliplasmid, oblimersen sodium, Vaccine to Target gp100 Antigen for Metastatic Melanoma, temozolomide, velimogene aliplasmid, sorafenib tosylate, DHA-Paclitaxel, melphalan, vitespen, cisplatin; dacarbazine, peginterferon alfa-2b, lenalidomide, melanoma lysate vaccine, celecoxib, tasisulam sodium, paclitaxel albumin bound, sorafenib tosylate, aldesleukin; histamine dihydrochloride, Canvaxin, sorafenib tosylate, GM2-KLH Vaccine+Q521, elesclomol; paclitaxel, peginterferon alfa-2b, BMS-734019; ipilimumab, aldesleukin; cisplatin; dacarbazine; filgrastim; vinblastine, aldesleukin; cisplatin; dacarbazine; interferon alfa-2b; vinblastine sulfate, dacarbazine; oblimersen sodium, bevacizumab, oblimersen sodium, cisplatin; cytarabine; paclitaxel; treosulfan, Vaccine for Melanoma, melphalan; recombinant tumor necrosis factor, GM2-KLH vaccine; QS-21, Polyvalent Melanoma Vaccine+BCG Vaccine, aldesleukin; cisplatin; dacarbazine; interferon alfa; vinblastine, temozolomide, interferon gamma; melphalan; tumor necrosis factor alfa, Cellular Immunotherapy for Melanoma, retinol, interferon alfa-2a, Corynebacterium granulosum P40, melphalan, cisplatin, bacillus calmette-guerin vaccine; cyclophosphamide, aldesleukin; cisplatin; dacarbazine; interferon alfa; vinblastine, ranibizumab, interferon alfa, bacillus calmette-guerin vaccine, bacillus calmette-guerin vaccine, melphalan, interferon alfa, megestrol, interferon alpha-2, cisplatin; dacarbazine, bacillus calmette-guerin vaccine; dacarbazine, aldesleukin; lisofylline, dabrafenib mesylate, cyclophosphamide; dactinomycin; vincristine, bacillus calmette-guerin vaccine, bacillus calmette-guerin vaccine; dacarbazine, trametinib dimethyl sulfoxide, PV-10, cholecalciferol, timolol maleate, masitinib, fotemustine; interferon alfa-2b, talimogene laherparepvec, sodium biselenite, cisplatin; dacarbazine; vindesine, isotretinoin, Sylatron, fotemustine, seviprotimut-L, dabrafenib mesylate; trametinib dimethyl sulfoxide, peginterferon alfa-2a, aldesleukin; isotretinoin; peginterferon alfa-2b, dabrafenib mesylate; trametinib dimethyl sulfoxide, cobimetinib fumarate; vemurafenib, interferon alfa-2b; M-Vax, nivolumab, dacarbazine; paclitaxel, M-200, cholecalciferol, binimetinib, melphalan, sargramostim, pembrolizumab, gene therapy for malignant melanoma, eltrapuldencel-T, binimetinib; encorafenib, sargramostim; tyrosinase peptide vaccine, pembrolizumab; talimogene laherparepvec, autologous tumor-infiltrating lymphocytes, talimogene laherparepvec, dabrafenib mesylate; ipilimumab; nivolumab; trametinib dimethyl sulfoxide, aldesleukin; cyclophosphamide; fludarabine; tumor infiltrating lymphocytes, PV-10, talimogene laherparepvec, HM-95573, dabrafenib mesylate; trametinib dimethyl sulfoxide, interferon beta, ipilimumab; nivolumab, Darleukin; Fibromun, LN-144, binimetinib, epacadostat; pembrolizumab, oblimersen sodium, agatolimod sodium, lenalidomide, interferon alfa-2a; peginterferon alfa-2a, CSF-470, Melanoma vaccine modified to express HLA A2/4-1BB ligand (Cellular Immunotherapy for Metastatic Melanoma), ipilimumab; nivolumab; sargramostim, ImmuniCell (Cellular Immunotherapy for Cancer and Viral Infections), trabedersen, BTH-1677, trametinib dimethyl sulfoxide, melphalan (Melblez), AS15+recMAGE-A3, binimetinib, binimetinib+encorafenib, Cellular Immunotherapy for Cancer and Viral Infections, CSF-470, dabrafenib mesylate (Tafinlar), dabrafenib mesylate+trametinib dimethyl sulfoxide, Darleukin, encorafenib, epacadostat, masitinib, PV-10, Sargramostim (Leukine), seviprotimut-L, trabedersen, Vaccine for Breast Cancer, Melanoma and Soft Tissue Sarcoma and Vemurafenib (Zelboraf).

[0297] In particularly preferred embodiments, the at least one additional pharmaceutically active ingredient is a compound, which is conventionally used in the treatment and/or prophylaxis of melanoma, preferably advanced and/or metastatic melanoma and most preferably advanced cMEL, wherein the compound is a PD-1 inhibitor, preferably an antagonistic PD-1 antibody, preferably selected from the group consisting of Nivolumab (Opdivo), and Pembrolizumab (Keytruda).

[0298] In certain embodiments, the at least one additional pharmaceutically active ingredient is a compound, which is conventionally used in the treatment and/or prophylaxis of squamous cell cancer of the skin (SCC), preferably unresectable and/or advanced SCC, wherein the compound is preferably selected from the group consisting of Cetuximab (Erbitux), paclitaxel albumin bound (Abraxane), (gimeracil+oteracil+tegafur) (TS-1), Docetaxel (Docetaxel, Doxel, Taxotere, Docetaxel An, Docel, Nanoxel M, Tautax, Docetaxel −AS, Docetaxel-M, Qvidadotax, Relidoce, Taxelo, Oncodocel, Doxotel, Pacancer, Docetrust, Dodetax, Dodabur, Soulaxcin, Taxedol, Docefim, Docetaxel, Ribodocel, Critidoc, Asodoc, Chemodoc, Docelibbs, Docenat, Dincilezan, Dostradixinol, Docefrez, Ca mitotic, Oncotaxel, Somatixel, Belotaxel, Qvidadotax, Taxceus, Cetadocure, Docetaxel CT, Tevaxter, Docirena, Eurotere, Axtere, Celotax, Taxanit, Drobanos, Cetado, Doxocad, Taxceus, Egidox, Tedocad, Docecad, Docelex, Docetax, Docetaxel, Docetere, Dotax, Taxuba, Monotaxel, Taceedo, Detaxl, Docet, Docetaxel, Ferdotax, Wintaxel), (tegafur+uracil) (Uft, Uft Tefudex, Unitoral, Luporal, Tagracil), Fluorouracil (5-FU), (gimeracil+oteracil+tegafur) ODT (TS-1 Combination OD), bleomycin sulfate (Tecnomicina, Cinaleo, Bleomycin, Bloicin-S, Bonar, Bleocin, Bleomycin Sulfate, Bleo, Bleocel, Bleotex, Oncobleo, Bleonco, Bleosol, Lyoble, Bleomycin Sulfate, Blenamax, Bleomycin, Blenoxane, Bleomicina, Bleomycine Bellon, Bleoprim), carboplatin (Carboplatin, Platamine CS, Carbaccord, Carboplatina, Carboplatino, Paraplatin, Carbosin, Tecnocarb, Carbomerck, Paract, Carboplatine CTRS, Carboplatine Intsel Chimos, Carboplatin, Carbokem, Carbotinol, Fauldcarbo, Evocarb, Citoplatina, Platin), ciprofloxacin (Hypoflox, Ufexil), ciprofloxacin hydrochloride (Ciprofloxacin Pharma, Prodin, Ciproxin), cisplatin (Cisplatin, Stritin, Ifapla, Accocit, Unistin, Cancertin, Cisplan, Citoplax, Nuoxin, Placis, Cisplatino, Displanor, Randa, Cispla, Fauldcispla, Briplatin, Platinex, Platinol, Platinex, Riboplatin, Cisplatine, Platistine CS, Platosin, Accocit, Cisplatino) cyclophosphamide (Endoxan, Cyclophosphamide), doxifluridine (Doxifluridine, May Vladimir), doxorubicin (Doxorubicin Hydrochloride, Adriamycin RDF, Doxorubicin, Doxorubicin PFS), epirubicin, hydrochloride (Brecila, Cloridrato De Epirrubicina, Epirubicin, Farmorubicina, Nuovodox, Adnexa, 4-Eppedo, Favicin), fluorouracil (Agicil, Fluorouracil, Fauldfluor, Oncourcil, Flocil, 5 Flucel), folic acid+methotrexate (Truxofol), human adenovirus type 5 (recombinant) (Oncorine), hydroxyurea (Oxyrea, Durea, Myelostat, Riborea, Unidrea, Ondrea, Hydran, Leukocel, Hydroxyurea, Hydrea), ifosfamide (Holoxan, Ifosfamide EG), levamisole (Zirsol), methotrexate Methotrexate (Tratoben, Methotrexate, Fresexate, Neometho, Fauldmetro, Methotrexate Sodium, Methocel, Hytas, Methaccord, Methofill, Metotrexato, Traxacord, Plastomet, Tevatrex, Metrex, Caditrex, Carditrex, Vibzi, Imutrex, Biotrexate, Methorex, Mexate, Neotrexate, Oncotrex, Remtrex, Trixilem, Hi-Trex, Metorex, Trex, Unitrexate, Ebetrexac, Fauldexato, Lantarel, Maxtrex, Miantrex CS, Rheumatrex, Folex, Folex PFS, Abitrexate, Tevametho, Trexall, Emthexate, Abitrexate, Meadow), mitomycin (Mitomycin C, Mitomycin, Mitonco, Lyomit), nedaplatin (Jiebaishu, Aoxianda, Aqupla), nimesulide (Nimulid), nimotuzumab (Biomab EGFR, Laedemab), nitrofurantoin (Furatsilin), ofloxacin (Entof), paclitaxel (Paclitaxel, Taxol), peplomycin sulfate (Pepleo), picibanil (Picibanil), pirarubicin (Pirarubicin Hydrochloride, Therarubicin, Pinorubin), sodium glycididazole (CMNa), tegafur (Utefos, Icarus, Futraful, Tegafur Gimeracil Oteracil Potassium), temoporfin (Foscan), topotecan hydrochloride (Topotecan), ubenimex (Ubenimex), vinblastine sulfate (Vinblastine, Vblastin), vincristine sulfate (Vincristine, Vincristine Sulfate, Vincristin, Sutivin, vindesine sulfate (Eldisine), carboplatin (Carboplatine Qualimed, Carboplatine, Carboplatino, Carboplatin), cisplatin (Cisplatin), docetaxel (Kamdocon, Naltoxater, Docetaxel), fluorouracil (Fluorouracil, Fluorouracile, Fluorouracil), methotrexate (Methotrexate Sodium, Mexate, Mexate Aq, Biometrox, Medsatrexate, Otaxem), vincristine sulfate (Oncovin), fluorouracil, sunitinib malate, acitretin, fibrin sealant, cetuximab, cetuximab, erlotinib, cisplatin; docetaxel; fluorouracil, undisclosed anti-cancer drug, gefitinib, pravastatin sodium, sirolimus, undisclosed chemotherapy, cisplatin; docetaxel; fluorouracil, sirolimus, fluorouracil; undisclosed taxane, methyl aminolevulinate hydrochloride, cisplatin; docetaxel; fluorouracil, erlotinib hydrochloride, cetuximab, imiquimod, undisclosed Chinese herbal medicine, aspirin; enalapril maleate, undisclosed chemotherapy, cetuximab, (gimeracil+oteracil+tegafur); carboplatin; cisplatin, cisplatin; fluorouracil; nimotuzumab, carboplatin; paclitaxel albumin bound, cisplatin; nedaplatin, bleomycin, nedaplatin, cisplatin; paclitaxel, paclitaxel albumin bound, (gimeracil+oteracil+tegafur), bleomycin; undisclosed chemotherapy, apatinib; docetaxel, undisclosed immunomodulatory supplement, BCM-95, aminolevulinic acid hydrochloride, nedaplatin, cisplatin; palifermin, cetuximab, gefitinib, bevacizumab, belagenpumatucel-L, cisplatin; tirapazamine, cisplatin; tirapazamine, cisplatin; gemcitabine; paclitaxel; topotecan; vinorelbine, cisplatin; fluorouracil, panitumumab, carboplatin; docetaxel; gemcitabine hydrochloride; vinorelbine tartrate, amifostine; fluorouracil, cisplatin; fluorouracil, carboplatin; paclitaxel, tirapazamine, cisplatin; epoetin alfa, figitumumab, melphalan; tumor necrosis factor alf, cisplatin, cisplatin; fluorouracil, cisplatin; undisclosed chemotherapy, docetaxel, contusugene ladenovec, cisplatin; fluorouracil; paclitaxel, docetaxel, human papillomavirus [serotypes 16, 18](bivalent) vaccine, isotretinoin, cisplatin; fluorouracil, misonidazole, paclitaxel, palifermin, endostatin, pilocarpine, cisplatin; docetaxel; filgrastim; fluorouracil; paclitaxel, cisplatin; docetaxel; filgrastim; fluorouracil; paclitaxel, cisplatin; irinotecan hydrochloride, cisplatin; gemcitabine, cisplatin; epirubicin; fluorouracil; undisclosed chemotherapy, methyl aminolevulinate hydrochloride, carboplatin; paclitaxel, carbogen; carbon dioxide; niacinamide, cisplatin; fluorouracil, talimogene laherparepvec, epoetin alfa, cisplatin; fluorouracil; panitumumab, cisplatin; fluorouracil, cisplatin; fluorouracil, aldesleukin, cisplatin; fluorouracil, cisplatin; paclitaxel, cisplatin; fluorouracil, fluorouracil; leucovorin; lobaplatin, cisplatin, cisplatin; ethyl mercaptan; ifosfamide; mesna; mitolactol, doxorubicin; levamisole, (tegafur+uracil), cisplatin; fluorouracil, cisplatin; vinorelbine, carboplatin; cisplatin; gemcitabine hydrochloride, Corynebacterium parvum; doxorubicin, capecitabine; cisplatin; fluorouracil; paclitaxel, fluorouracil; leucovorin; methotrexate, rAd-p53, cetuximab; cisplatin; docetaxel, PV-10, methyl aminolevulinate hydrochloride, cisplatin; fluorouracil, paclitaxel; topotecan hydrochloride, carboplatin; cisplatin; paclitaxel, cisplatin; topoteca n hydrochloride, cisplatin; etoposide, docetaxel; fluorouracil, aspirin, cisplatin; gemcitabine, Lactobacillus brevis CD2, cisplatin; docetaxel, fosbretabulin tromethamine, panitumumab, fluorouracil, paclitaxel, carboplatin; cisplatin; docetaxel; fluorouracil, fluorouracil, erlotinib hydrochloride, cisplatin; undisclosed chemotherapy; vinorelbine, (gimeracil+oteracil+tegafur); carboplatin, cetuximab, contusugene ladenovec, cetuximab, methyl aminolevulinate hydrochloride, cyclophosphamide, (gimeracil+oteracil+tegafur); cisplatin, paclitaxel albumin bound, carboplatin; paclitaxel, cisplatin; gemcitabine, capecitabine; cisplatin, docetaxel, Z-100, cisplatin; ifosfamide; paclitaxel, nimotuzumab, irinotecan hydrochloride, celecoxib; methotrexate, Nutrison, carboplatin; cisplatin; fluorouracil; paclitaxel, cisplatin; paclitaxel, cisplatin; docetaxel; vinorelbine, paclitaxel, (gimeracil+oteracil+tegafur); cisplatin, carboplatin; paclitaxel, methyl aminolevulinate hydrochloride, Aibin, cisplatin; fluorouracil, porfimer sodium, carboplatin; cisplatin; tocotrienol; vinorelbine, (gimeracil+oteracil+tegafur); cisplatin; paclitaxel, docetaxel, ipilimumab, cisplatin, VB-4847, celecoxib; thalidomide, cisplatin; epirubicin; fluorouracil, cisplatin; fluorouracil, fluorouracil, carboplatin; paclitaxel, cetuximab; cisplatin; docetaxel, autologous cytokine induced killer cells, cisplatin; docetaxel; fluorouracil, cisplatin; epirubicin; fluorouracil, tergenpumatucel-L, cetuximab; cisplatin; docetaxel, Elental, cisplatin; nimotuzumab; paclitaxel, eicosapentaenoic acid; undisclosed nutritional supplement, palbociclib, pembrolizumab (Keytruda), nimotuzumab, apatorsen and dacomitinib.

[0299] In particularly preferred embodiments, the at least one additional pharmaceutically active ingredient is a compound, which is conventionally used in the treatment and/or prophylaxis of squamous cell cancer of the skin (SCC), preferably unresectable and/or advanced SCC, wherein the compound is a PD-1 inhibitor, preferably an antagonistic PD-1 antibody, preferably selected from the group consisting of Nivolumab (Opdivo), and Pembrolizumab (Keytruda).

[0300] In some embodiments, the at least one additional pharmaceutically active ingredient is a compound, which is conventionally used in the treatment and/or prophylaxis of squamous cell carcinoma of the head and neck (HNSCC), preferably advanced HNSCC, wherein the compound is preferably selected from the group consisting of Nivolumab, Cetuximab (Erbitux), paclitaxel albumin bound (Abraxane), gimeracil+oteracil+tegafur (TS-1), docetaxel (Docetaxel, Doxel, Taxotere, Docetaxel An, Nanoxel M, Tautax, Docetaxel −AS, Docetaxel-M, Qvidadotax, Relidoce, Taxelo, Oncodocel, Doxotel, Pacancer, Docetrust, Dodetax, Dodabur, Soulaxcin, Taxedol, Docefim, Ribodocel, Critidoc, Asodoc, Chemodoc, Docelibbs, Docenat, Dincilezan, Dostradixinol, Docefrez, Camitotic, Oncotaxel, Somatixel, Belotaxel, Qvidadotax, Taxceus, Cetadocure, Docetaxel CT, Tevaxter, Docirena, Eurotere, Axtere, Celotax, Taxanit, Drobanos, Cetado, Doxocad, Taxceus, Egidox, Tedocad, Docecad, Docelex, Docetax, Docetere, Dotax, Taxuba, Monotaxel, Taceedo, Detaxl, Docet, Ferdotax, Wintaxel, Kamdocon, Naltoxater), tegafur+uracil (Uft, Uft E, tefudex, Unitoral, Luporal Tagracil), fluorouracil (bn: 5-FU, Fluorouracil, Fluorouracile), gimeracil+oteracil+tegafur ODT (bn TS-1 Combination OD), bleomycin sulfate (Tecnomicina, Cinaleo, Bleomycin, Bloicin-S, Bonar, Bleocin, Bleo Bleomycin Sulfate, Bleocel, Bleotex, Oncobleo, Bleonco, Bleosol, Lyoble, Bleomycin Sulfate, Blenamax, Blenoxane, Bleomicina Bleomycine Belton Bleoprim), carboplatin (Carboplatin Plata mine CS Carbaccord Carboplatina Carboplatino Paraplatin Carbosin Tecnocarb Carbomerck, Paract, Carboplatine CTRS, Carboplatine Intsel Chimos, Carbokem Carbotinol Fauldcarbo, Evocarb, Citoplatina, Platin, Carboplatine Qua limed, Carboplatine, Carboplatino, Carboplatin), ciprofloxacin (Hypoflox, Ufexil), ciprofloxacin hydrochloride (Ciprofloxacin Pharma, Prodin, Ciproxin), cisplatin (Cisplatin, Stritin, Ifapla, Accocit, Unistin, Cancertin, Cisplan, Citoplax, Nuoxin, Placis, Cisplatino, Displanor, Cisplatine, Randa, Cisplatin, Cispla, Fauldcispla, Briplatin, Platinex, Platinol, Riboplatin, Platistine CS, Platosin, Accocit), cyclophosphamide (Endoxan, Cyclophosphamide), doxifluridine (Doxifluridine, May Vladimir, Doxifluridine), doxorubicin (Doxorubicin Hydrochloride, Adriamycin RDF, Doxorubici, Doxorubicin Hydrochloride, Doxorubicin PFS), epirubicin hydrochloride (Brecila, Cloridrato De Epirrubicina, Epirubicin, Farmorubicina, Nuovodox, Adnexa, 4-Eppedo, Favicin), fluorouracil (Agicil, Fluorouracil, Fauldfluor, Oncourcil Flocil, 5 Flucel), folic acid+methotrexate (Truxofol), human adenovirus type 5 (recombinant) (Oncorine), hydroxyurea (Oxyrea, Durea, Myelostat, Riborea, Unidrea, Ondrea, Hydra n, Leukocel, Hydroxyurea, Hydrea), ifosfamide (Holoxan, Ifosfamide EG), levamisole (Zirsol), methotrexate (Tratoben, Methotrexate, Fresexate, Neometho, Fauldmetro, Methotrexate Sodium, Methocel, Hytas, Methaccord, Methofill, Metotrexato, Traxacord, Plastomet, Tevatrex, Metrex, Caditrex, Carditrex, Vibzi, Imutrex, Biotrexate, Methorex, Mexate, Neotrexate, Oncotrex, Remtrex, Trixilem, Hi-Trex, Metorex, Trex, Unitrexate, Ebetrexac, Fauldexato, Lantarel, Maxtrex, Miantrex CS, Rheumatrex, Folex, Folex PFS, Abitrexate, Trexall, Emthexate, Abitrexate, Meadow, Mexate Aq, Biometrox, Otaxem), Mitomycin (Mitomycin C, Mitomycin, Mitonco, Lyomit), Nedaplatin (Jiebaishu, Aoxianda, Aqupla), Nimesulide (Nimulid), Nimotuzumab (Biomab EGFR, Laedemab), Nitrofurantoin (Furatsilin), Ofloxacin (Entof), Paclitaxel (Paclitaxel, Taxol), peplomycin sulfate (Pepleo), picibanil (Picibanil), pirarubicin (Pirarubicin Hydrochloride, Therarubicin, Pinorubin), sodium glycididazole (CMNa), tegafur (Utefos, Icarus, Futraful, Tegafur Gimeracil Oteracil Potassium), temoporfin (Foscan), topotecan hydrochloride (Topotecan), ubenimex (Ubenimex), vinblastine sulfate (Vinblastine, Vblastin, Vincristine, Vincristine Sulfate, Vincristin, Sutivin, Vincrisan, Eldisine), vincristine sulfate (Oncovin), gefitinib, escitalopram oxalate, Gene Therapy to Activate p53 for Oncology, cevimeline hydrochloride, docetaxel; lenograstim, bortezomib; docetaxel; irinotecan, carboplatin; paclitaxel, cisplatin; docetaxel; fluorouracil, human papillomavirus vaccine (Vaccination Against Human Papillomavirus Types 16 and 18 and Unvaccinated Controls), carboplatin; cisplatin; paclitaxel, undisclosed epidermal growth factor receptor inhibitor, cetuximab, sorafenib tosylate; sunitinib malate, amifostine, cisplatin; dexamethasone; docetaxel; metoclopramide, platinum based chemotherapy, cetuximab; nimotuzumab, nimotuzumab, dobutamine hydrochloride; dopexamine hydrochloride; epinephrine; norepinephrine bitartrate, cetuximab; cisplatin, cetuximab; cisplatin; docetaxel; fluorouracil, cisplatin; paclitaxel, Gendicine, Doce onkovis (Docetaxel), Picibanil, docetaxel; lobaplatin, oxytetracycline hydrochloride, cisplatin; mitomycin, bleomycin, nimotuzumab, cisplatin; fluorouracil; nimotuzumab, cetuximab; cisplatin; cyclophosphamide; dacarbazine; docetaxel; doxorubicin; etoposide; fluorouracil; gemcitabine hydrochloride; irinotecan hydrochloride; oxaliplatin; paclitaxel; pemetrexed disodium; temozolomide, varenicline, acetylcysteine, dopamine; norepinephrine, (gimeracil+oteracil+tegafur), nimotuzumab, icotinib hydrochloride, Kushen (kuh-seng), Carboxymethylpachymaran, BCM-95, Lactofos, Pegfilgrastim, methadone, Varanadi ghrita, cisplatin; palifermin, cetuximab, cisplatin; lapatinib ditosylate, gefitinib, zalutumumab, erlotinib hydrochloride, beta carotene; E-Tabs, bevacizumab, levothyroxine; liothyronine sodium; recombinant human thryroid stimulating hormone, cisplatin; docetaxel; fluorouracil; hydroxyurea, fluorouracil, docetaxel; St. John's Wort, carboplatin; cisplatin; fluorouracil; paclitaxel, Biafine, methotrexate, cisplatin; fluorouracil, alpha tocopherol; isotretinoin; recombinant interferon alfa, panitumumab, cisplatin, bleomycin; fluorouracil; leucovorin; methotrexate; vincristine, nimotuzumab, panitumumab, amifostine; fluorouracil, cisplatin; docetaxel; fluorouracil, capecitabine; cisplatin; fluorouracil, pemetrexed disodium, cisplatin; gemcitabine, tranexamic acid, carboplatin; fluorouracil, cefazolin, epoetin alfa, tirapazamine, erlotinib hydrochloride, cetuximab; docetaxel; fluorouracil, megestrol, contusugene ladenovec, cevimeline hydrochloride, cisplatin; fluorouracil, cisplatin; fluorouracil; paclitaxel, isotretinoin, porfiromycin, escitalopram oxalate, gimeracil+oteracil+tegafur, IntraDose (Cisplatin Plus Epinephrine), misonidazole, tirapazamine, carboplatin; cisplatin; docetaxel; fluorouracil, gefitinib, epoetin alfa, paclitaxel, gefitinib, palifermin, pilocarpine, celecoxib, cisplatin; docetaxel; filgrastim; fluorouracil; paclitaxel, cisplatin; fluorouracil; leucovorin, cisplatin; gemcitabine; mannitol, Lactobacillus brevis CD2, Glutamine, carbogen; niacinamidem, cetuximab; cisplatin; docetaxel; fluorouracil, carbogen; carbon dioxide; niacinamide, cisplatin; docetaxel; fluorouracil, Soluble Beta Glucan, contusugene ladenovec, zalutumumab, talimogene laherparepvec, sucralfate, doxepin, methotrexate, amifostine, capsaicin, cisplatin; fluorouracil; panitumumab, aldesleukin, tranexamic acid, zinc sulfate, bacillus calmette-guerin [connaught] vaccine; bleomycin; cyclophosphamide; fluorouracil; methotrexate, amifostine, fluorouracil; hydroxyurea, bacitracin; clotrimazole; gentamicin, cyclophospha mide; doxorubicin, pelareorep, filgrastim, enteral nutrition, pentoxifylline, epirubicin; fluorouracil; leucovorin; mitomycin, porfiromycin, bleomycin; cisplatin; methotrexate; vincristine, bacillus calmette-guerin vaccine; isoniazid; methotrexate, fluorouracil; leucovorin; methotrexate, rAd-p53, PV-10, Leukocyte Interleukin, nimotuzumab, afatinib dimaleate, afatinib dimaleate; cisplatin, carboplatin; cetuximab; fluorouracil, cetuximab; cisplatin, nedaplatin, docetaxel; fluorouracil, nimorazole, gemcitabine hydrochloride, afatinib dimaleate, nedaplatin, contusugene ladenovec, Lactobacillus brevis CD2, cetuximab, nimotuzumab, E-10A, cisplatin; gemcitabine, cisplatin; lobaplatin, endostatin (recombinant)_dapsone; doxycycline; minocycline, carboplatin; cyclophosphamide; docetaxel; doxorubicin; paclitaxel, nivolumab, pelareorep, autologous stem cells; carboplatin; etoposide; ifosfamide, vinflunine ditartrate, gemcitabine, cisplatin; fluorouracil; mitomycin, porfiromycin, Olimel, pembrolizumab, AminoPure, nedaplatin, Liang Ge San, eicosapentaenoic acid, celecoxib; methotrexate, cisplatin; pembrolizumab, (tegafur+uracil); cisplatin; epirubicin; mitomycin, durvalumab; tremelimumab, sodium hypochlorite, cetuximab; cisplatin, cisplatin; paclitaxel, amcasertib, capecitabine, R-TPR-033, VB-4847, gabapentin, raltitrexed, cisplatin; fluorouracil; leucovorin, cisplatin; docetaxel, celecoxib, durvalumab; durvalumab+tremelimumab, TT-10, (sodium alginate+sodium carbonate+propolis+aloe vera+calendula+honey+chamomile); cisplatin, pembrolizumab; talimogene laherparepvec, avelumab, nimorazole, eicosapentaenoic acid, lovastatin, dexamethasone; etoposide; gemcitabine; pegaspargase, ipilimumab; nivolumab, cetuximab; cisplatin; nivolumab, capecitabine; cisplatin; docetaxel, isotretinoin, carboplatin; cisplatin; gemcitabine; paclitaxel, erlotinib hydrochloride, VB-4847 (Proxinium Plus Best Supportive Care), celecoxib; thalidomide, cisplatin; fluorouracil, curcumin, celecoxib, imiquimod, cisplatin; cyclophosphamide; etoposide, sotatercept, cisplatin; docetaxel; fluorouracil, cetuximab; cisplatin; docetaxel, human endostatin, melatonin, epigallocatechin gallate, cisplatin; gemcitabine, gemcitabine; paclitaxel, (gimeracil+oteracil+tegafur), eicosapentaenoic acid; undisclosed nutritional supplement, celecoxib; methotrexate, pembrolizumab (Keytruda), afatinib dimaleate, cetuximab (Erbitux), durvalumab, durvalumab+tremelimumab, E-10A, entrectinib, Leukocyte Interleukin (Multikine), nimotuzumab, nivolumab (Opdivo), pelareorep (Reolysin), TT-10, vinflunine ditartrate (Javlor), acalabrutinib, AlloVax and alpelisib.

[0301] In particularly preferred embodiments, the at least one additional pharmaceutically active ingredient is a compound, which is conventionally used in the treatment and/or prophylaxis of squamous cell carcinoma of the head and neck (HNSCC), preferably advanced HNSCC, wherein the compound is a PD-1 inhibitor, preferably an antagonistic PD-1 antibody, preferably selected from the group consisting of Nivolumab, and Pembrolizumab (Keytruda).

[0302] In some embodiments, the at least one additional pharmaceutically active ingredient is a compound, which is conventionally used in the treatment and/or prophylaxis of adenocystic carcinoma (ACC), preferably advanced ACC, wherein the compound is preferably selected from the group consisting of Nivolumab, Cetuximab (Erbitux), paclitaxel albumin bound (Abraxane), gimeracil+oteracil+tegafur (TS-1), docetaxel (Docetaxel, Doxel, Taxotere, Docetaxel An, Nanoxel M, Tautax, Docetaxel −AS, Docetaxel-M, Qvidadotax, Relidoce, Taxelo, Oncodocel, Doxotel, Pacancer, Docetrust, Dodetax, Dodabur, Soulaxcin, Taxedol, Docefim, Ribodocel, Critidoc, Asodoc, Chemodoc, Docelibbs, Docenat, Dincilezan, Dostradixinol, Docefrez, Camitotic, Oncotaxel, Somatixel, Belotaxel, Qvidadotax, Taxceus, Cetadocure, Docetaxel CT, Tevaxter, Docirena, Eurotere, Axtere, Celotax, Taxanit, Drobanos, Cetado, Doxocad, Taxceus, Egidox, Tedocad, Docecad, Docelex, Docetax, Docetere, Dotax, Taxuba, Monotaxel, Taceedo, Detaxl, Docet, Ferdotax, Wintaxel, Kamdocon, Naltoxater), tegafur+uracil (Uft, Uft E, tefudex, Unitoral, Luporal Tagracil), fluorouracil (bn: 5-FU, Fluorouracil, Fluorouracile), gimeracil+oteracil+tegafur ODT (bn TS-1 Combination OD), bleomycin sulfate (Tecnomicina, Cinaleo, Bleomycin, Bloicin-S, Bonar, Bleocin, Bleo Bleomycin Sulfate, Bleocel, Bleotex, Oncobleo, Bleonco, Bleosol, Lyoble, Bleomycin Sulfate, Blenamax, Blenoxane, Bleomicina, Bleomycine Belton Bleoprim), carboplatin (Carboplatin Platamine CS Carbaccord Carboplatina Carboplatino Paraplatin Carbosin Tecnocarb Carbomerck, Paract, Carboplatine CTRS, Carboplatine Intsel Chimos, Carbokem Carbotinol Fauldcarbo, Evocarb, Citoplatina, Platin, Carboplatine Qua limed, Carboplatine, Carboplatino, Carboplatin), ciprofloxacin (Hypoflox, Ufexil), ciprofloxacin hydrochloride (Ciprofloxacin Pharma, Prodin, Ciproxin), cisplatin (Cisplatin, Stritin, Ifapla, Accocit, Unistin, Cancertin, Cisplan, Citoplax, Nuoxin, Placis, Cisplatino, Displanor, Cisplatine, Randa, Cisplatin, Cispla, Fauldcispla, Briplatin, Platinex, Platinol, Riboplatin, Platistine CS, Platosin, Accocit), cyclophosphamide (Endoxan, Cyclophosphamide), doxifluridine (Doxifluridine, May Vladimir, Doxifluridine), doxorubicin (Doxorubicin Hydrochloride, Adriamycin RDF, Doxorubici, Doxorubicin Hydrochloride, Doxorubicin PFS), epirubicin hydrochloride (Brecila, Cloridrato De Epirrubicina, Epirubicin, Farmorubicina, Nuovodox, Adnexa, 4-Eppedo, Favicin), fluorouracil (Agicil, Fluorouracil, Fauldfluor, Oncourcil Flocil, 5 Flucel), folic acid+methotrexate (Truxofol), human adenovirus type 5 (recombinant) (Oncorine), hydroxyurea (Oxyrea, Durea, Myelostat, Riborea, Unidrea, Ondrea, Hydran, Leukocel, Hydroxyurea, Hydrea), ifosfamide (Holoxan, Ifosfamide EG), levamisole (Zirsol), methotrexate (Tratoben, Methotrexate, Fresexate, Neometho, Fauldmetro, Methotrexate Sodium, Methocel, Hytas, Methaccord, Methofill, Metotrexato, Traxacord, Plastomet, Tevatrex, Metrex, Caditrex, Carditrex, Vibzi, Imutrex, Biotrexate, Methorex, Mexate, Neotrexate, Oncotrex, Remtrex, Trixilem, Hi-Trex, Metorex, Trex, Unitrexate, Ebetrexac, Fauldexato, Lantarel, Maxtrex, Miantrex CS, Rheumatrex, Folex, Folex PFS, Abitrexate, Trexall, Emthexate, Abitrexate, Meadow, Mexate Aq, Biometrox, Otaxem), Mitomycin (Mitomycin C, Mitomycin, Mitonco, Lyomit), Nedaplatin (Jiebaishu, Aoxianda, Aqupla), Nimesulide (Nimulid), Nimotuzumab (Biomab EGFR, Laedemab), Nitrofurantoin (Furatsilin), Ofloxacin (Entof), Paclitaxel (Paclitaxel, Taxol), peplomycin sulfate (Pepleo), picibanil (Picibanil), pirarubicin (Pirarubicin Hydrochloride, Therarubicin, Pinorubin), sodium glycididazole (CMNa), tegafur (Utefos, Icarus, Futraful, Tegafur Gimeracil Oteracil Potassium), temoporfin (Foscan), topotecan hydrochloride (Topotecan), ubenimex (Ubenimex), vinblastine sulfate (Vinblastine, Vblastin, Vincristine, Vincristine Sulfate, Vincristin, Sutivin, Vincrisan, Eldisine), vincristine sulfate (Oncovin), gefitinib, escitalopram oxalate, Gene Therapy to Activate p53 for Oncology, cevimeline hydrochloride, docetaxel; lenograstim, bortezomib; docetaxel; irinotecan, carboplatin; paclitaxel, cisplatin; docetaxel; fluorouracil, human papillomavirus vaccine (Vaccination Against Human Papillomavirus Types 16 and 18 and Unvaccinated Controls), carboplatin; cisplatin; paclitaxel, undisclosed epidermal growth factor receptor inhibitor, cetuximab, sorafenib tosylate; suntinib malate, amifostine, cisplatin; dexa methasone; docetaxel; metoclopra mide, platinum based chemotherapy, cetuximab; nimotuzumab, nimotuzumab, dobutamine hydrochloride; dopexamine hydrochloride; epinephrine; norepinephrine bitartrate, cetuximab; cisplatin, cetuximab; cisplatin; docetaxel; fluorouracil, cisplatin; paclitaxel, Gendicine, Doce onkovis (Docetaxel), Picibanil, docetaxel; lobaplatin, oxytetracycline hydrochloride, cisplatin; mitomycin, bleomycin, nimotuzumab, cisplatin; fluorouracil; nimotuzumab, cetuximab; cisplatin; cyclophosphamide; dacarbazine; docetaxel; doxorubicin; etoposide; fluorouracil; gemcitabine hydrochloride; irinotecan hydrochloride; oxaliplatin; paclitaxel; pemetrexed disodium; temozolomide, varenicline, acetylcysteine, dopamine; norepinephrine, (gimeracil+oteracil+tegafur), nimotuzumab, icotinib hydrochloride, Kushen (kuh-seng), Carboxymethylpachymaran, BCM-95, Lactofos, Pegfilgrastim, methadone, Varanadi ghrita, cisplatin; palifermin, cetuximab, cisplatin; lapatinib ditosylate, gefitinib, zalutumumab, erlotinib hydrochloride, beta carotene; E-Tabs, bevacizumab, levothyroxine; liothyronine sodium; recombinant human thryroid stimulating hormone, cisplatin; docetaxel; fluorouracil; hydroxyurea, fluorouracil, docetaxel; St. John's Wort, carboplatin; cisplatin; fluorouracil; paclitaxel, Biafine, methotrexate, cisplatin; fluorouracil, alpha tocopherol; isotretinoin; recombinant interferon alfa, panitumumab, cisplatin, bleomycin; fluorouracil; leucovorin; methotrexate; vincristine, nimotuzumab, panitumumab, amifostine; fluorouracil, cisplatin; docetaxel; fluorouracil, capecitabine; cisplatin; fluorouracil, pemetrexed disodium, cisplatin; gemcitabine, tranexamic acid, carboplatin; fluorouracil, cefazolin, epoetin alfa, tirapaza mine, erlotinib hydrochloride, cetuximab; docetaxel; fluorouracil, megestrol, contusugene ladenovec, cevimeline hydrochloride, cisplatin; fluorouracil, cisplatin; fluorouracil; paclitaxel, isotretinoin, porfiromycin, escitalopram oxalate, gimeracil+oteracil+tegafur, IntraDose (Cisplatin Plus Epinephrine), misonidazole, tirapazamine, carboplatin; cisplatin; docetaxel; fluorouracil, gefitinib, epoetin alfa, paclitaxel, gefitinib, palifermin, pilocarpine, celecoxib, cisplatin; docetaxel; filgrastim; fluorouracil; paclitaxel, cisplatin; fluorouracil; leucovorin, cisplatin; gemcitabine; mannitol, Lactobacillus brevis CD2, Glutamine, carbogen; niacinamidem, cetuximab; cisplatin; docetaxel; fluorouracil, carbogen; carbon dioxide; niacinamide, cisplatin; docetaxel; fluorouracil, Soluble Beta Glucan, contusugene ladenovec, zalutumumab, talimogene laherparepvec, sucralfate, doxepin, methotrexate, amifostine, capsaicin, cisplatin; fluorouracil; panitumumab, aldesleukin, tranexamic acid, zinc sulfate, bacillus calmette-guerin [connaught] vaccine; bleomycin; cyclophosphamide; fluorouracil; methotrexate, amifostine, fluorouracil; hydroxyurea, bacitracin; clotrimazole; gentamicin, cyclophosphamide; doxorubicin, pelareorep, filgrastim, enteral nutrition, pentoxifylline, epirubicin; fluorouracil; leucovorin; mitomycin, porfiromycin, bleomycin; cisplatin; methotrexate; vincristine, bacillus calmette-guerin vaccine; isoniazid; methotrexate, fluorouracil; leucovorin; methotrexate, rAd-p53, PV-10, Leukocyte Interleukin, nimotuzumab, afatinib dimaleate, afatinib dimaleate; cisplatin, carboplatin; cetuximab; fluorouracil, cetuximab; cisplatin, nedaplatin, docetaxel; fluorouracil, nimorazole, gemcitabine hydrochloride, afatinib dimaleate, nedaplatin, contusugene ladenovec, Lactobacillus brevis CD2, cetuximab, nimotuzumab, E-10A, cisplatin; gemcitabine, cisplatin; lobaplatin, endostatin (recombinant)_dapsone; doxycycline; minocycline, carboplatin; cyclophosphamide; docetaxel; doxorubicin; paclitaxel, nivolumab, pelareorep, autologous stem cells; carboplatin; etoposide; ifosfamide, vinflunine ditartrate, gemcitabine, cisplatin; fluorouracil; mitomycin, porfiromycin, Olimel, pembrolizumab, AminoPure, nedaplatin, Liang Ge San, eicosapentaenoic acid, celecoxib; methotrexate, cisplatin; pembrolizumab, (tegafur+uracil); cisplatin; epirubicin; mitomycin, durvalumab; tremelimumab, sodium hypochlorite, cetuximab; cisplatin, cisplatin; paclitaxel, amcasertib, capecitabine, R-TPR-033, VB-4847, gabapentin, raltitrexed, cisplatin; fluorouracil; leucovorin, cisplatin; docetaxel, celecoxib, durvalumab; durvalumab +tremelimumab, TT-10, (sodium alginate+sodium carbonate+propolis+aloe vera+calendula+honey+chamomile); cisplatin, pembrolizumab; talimogene laherparepvec, avelumab, nimorazole, eicosapentaenoic acid, lovastatin, dexamethasone; etoposide; gemcitabine; pegaspargase, ipilimumab; nivolumab, cetuximab; cisplatin; nivolumab, capecitabine; cisplatin; docetaxel, isotretinoin, carboplatin; cisplatin; gemcitabine; paclitaxel, erlotinib hydrochloride, VB-4847 (Proxinium Plus Best Supportive Care), celecoxib; thalidomide, cisplatin; fluorouracil, curcumin, celecoxib, imiquimod, cisplatin; cyclophosphamide; etoposide, sotatercept, cisplatin; docetaxel; fluorouracil, cetuximab; cisplatin; docetaxel, human endostatin, melatonin, epigallocatechin gallate, cisplatin; gemcitabine, gemcitabine; paclitaxel, (gimeracil+oteracil+tegafur), eicosapentaenoic acid; undisclosed nutritional supplement, celecoxib; methotrexate, pembrolizumab (Keytruda), afatinib dimaleate, cetuximab (Erbitux), durvalumab, durvalumab+tremelimumab, E-10A, entrectinib, Leukocyte Interleukin (Multikine), nimotuzumab, nivolumab (Opdivo), pelareorep (Reolysin), TT-10, vinflunine ditartrate (Javlor), acalabrutinib, AlloVax and alpelisib.

[0303] In some embodiments, the at least one additional pharmaceutically active ingredient is a compound, which is conventionally used in the treatment and/or prophylaxis of cutaneous T-cell lymphoma, preferably advanced cutaneous T-cell lymphoma, wherein the compound is preferably selected from the group consisting of Nivolumab, Cetuximab (Erbitux), paclitaxel albumin bound (Abraxane), gimeracil+oteracil+tegafur (TS-1), docetaxel (Docetaxel, Doxel, Taxotere, Docetaxel An, Nanoxel M, Tautax, Docetaxel −AS, Docetaxel-M, Qvidadotax, Relidoce, Taxelo, Oncodocel, Doxotel, Pacancer, Docetrust, Dodetax, Dodabur, Soulaxcin, Taxedol, Docefim, Ribodocel, Critidoc, Asodoc, Chemodoc, Docelibbs, Docenat, Dincilezan, Dostradixinol, Docefrez, Camitotic, Oncotaxel, Somatixel, Belotaxel, Qvidadotax, Taxceus, Cetadocure, Docetaxel CT, Tevaxter, Docirena, Eurotere, Axtere, Celotax, Taxanit, Drobanos, Cetado, Doxocad, Taxceus, Egidox, Tedocad, Docecad, Docelex, Docetax, Docetere, Dotax, Taxuba, Monotaxel, Taceedo, Detaxl, Docet, Ferdotax, Wintaxel, Kamdocon, Naltoxater), tegafur+uracil (Uft, Uft E, tefudex, Unitoral, Luporal Tagracil), fluorouracil (bn: 5-FU, Fluorouracil, Fluorouracile), gimeracil+oteracil+tegafur ODT (bn TS-1 Combination OD), bleomycin sulfate (Tecnomicina, Cinaleo, Bleomycin, Bloicin-S, Bonar, Bleocin, Bleo Bleomycin Sulfate, Bleocel, Bleotex, Oncobleo, Bleonco, Bleosol, Lyoble, Bleomycin Sulfate, Blenamax, Blenoxane, Bleomicina, Bleomycine Bellon Bleoprim), carboplatin (Carboplatin Platamine CS Carbaccord Carboplatina Carboplatino Paraplatin Carbosin Tecnocarb Carbomerck, Paract, Carboplatine CTRS, Carboplatine Intsel Chimos, Carbokem Carbotinol Fauldcarbo, Evocarb, Citoplatina, Platin, Carboplatine Qualimed, Carboplatine, Carboplatino, Carboplatin), ciprofloxacin (Hypoflox, Ufexil), ciprofloxacin hydrochloride (Ciprofloxacin Pharma, Prodin, Ciproxin), cisplatin (Cisplatin, Stritin, Ifapla, Accocit, Unistin, Cancertin, Cisplan, Citoplax, Nuoxin, Placis, Cisplatino, Displanor, Cisplatine, Randa, Cisplatin, Cispla, Fauldcispla, Briplatin, Platinex, Platinol, Riboplatin, Platistine CS, Platosin, Accocit), cyclophosphamide (Endoxan, Cyclophosphamide), doxifluridine (Doxifluridine, May Vladimir, Doxifluridine), doxorubicin (Doxorubicin Hydrochloride, Adriamycin RDF, Doxorubici, Doxorubicin Hydrochloride, Doxorubicin PFS), epirubicin hydrochloride (Brecila, Cloridrato De Epirrubicina, Epirubicin, Farmorubicina, Nuovodox, Adnexa, 4-Eppedo, Favicin), fluorouracil (Agicil, Fluorouracil, Fauldfluor, Oncourcil Flocil, 5 Flucel), folic acid+methotrexate (Truxofol), human adenovirus type 5 (recombinant) (Oncorine), hydroxyurea (Oxyrea, Durea, Myelostat, Riborea, Unidrea, Ondrea, Hydra n, Leukocel, Hydroxyurea, Hydrea), ifosfamide (Holoxan, Ifosfamide EG), levamisole (Zirsol), methotrexate (Tratoben, Methotrexate, Fresexate, Neometho, Fauldmetro, Methotrexate Sodium, Methocel, Hytas, Methaccord, Methofill, Metotrexato, Traxacord, Plastomet, Tevatrex, Metrex, Caditrex, Carditrex, Vibzi, Imutrex, Biotrexate, Methorex, Mexate, Neotrexate, Oncotrex, Remtrex, Trixilem, Hi-Trex, Metorex, Trex, Unitrexate, Ebetrexac, Fauldexato, Lantarel, Maxtrex, Miantrex CS, Rheumatrex, Folex, Folex PFS, Abitrexate, Trexall, Emthexate, Abitrexate, Meadow, Mexate Aq, Biometrox, Otaxem), Mitomycin (Mitomycin C, Mitomycin, Mitonco, Lyomit), Nedaplatin (Jiebaishu, Aoxianda, Aqupla), Nimesulide (Nimulid), Nimotuzumab (Biomab EGFR, Laedemab), Nitrofurantoin (Furatsilin), Ofloxacin (Entof), Paclitaxel (Paclitaxel, Taxol), peplomycin sulfate (Pepleo), picibanil (Picibanil), pirarubicin (Pirarubicin Hydrochloride, Therarubicin, Pinorubin), sodium glycididazole (CMNa), tegafur (Utefos, Icarus, Futraful, Tegafur Gimeracil Oteracil Potassium), temoporfin (Foscan), topotecan hydrochloride (Topotecan), ubenimex (Ubenimex), vinblastine sulfate (Vinblastine, Vblastin, Vincristine, Vincristine Sulfate, Vincristin, Sutivin, Vincrisan, Eldisine), vincristine sulfate (Oncovin), gefitinib, escitalopram oxalate, Gene Therapy to Activate p53 for Oncology, cevimeline hydrochloride, docetaxel; lenograstim, bortezomib; docetaxel; irinotecan, carboplatin; paclitaxel, cisplatin; docetaxel; fluorouracil, human papillomavirus vaccine (Vaccination Against Human Papillomavirus Types 16 and 18 and Unvaccinated Controls), carboplatin; cisplatin; paclitaxel, undisclosed epidermal growth factor receptor inhibitor, cetuximab, sorafenib tosylate; sunitinib malate, amifostine, cisplatin; dexamethasone; docetaxel; metoclopramide, platinum based chemotherapy, cetuximab; nimotuzumab, nimotuzumab, dobutamine hydrochloride; dopexamine hydrochloride; epinephrine; norepinephrine bitartrate, cetuximab; cisplatin, cetuximab; cisplatin; docetaxel; fluorouracil, cisplatin; paclitaxel, Gendicine, Doce onkovis (Docetaxel), Picibanil, docetaxel; lobaplatin, oxytetracycline hydrochloride, cisplatin; mitomycin, bleomycin, nimotuzumab, cisplatin; fluorouracil; nimotuzumab, cetuximab; cisplatin; cyclophosphamide; dacarbazine; docetaxel; doxorubicin; etoposide; fluorouracil; gemcitabine hydrochloride; irinotecan hydrochloride; oxaliplatin; paclitaxel; pemetrexed disodium; temozolomide, varenicline, acetylcysteine, dopamine; norepinephrine, (gimeracil+oteracil+tegafur), nimotuzumab, icotinib hydrochloride, Kushen (kuh-seng), Carboxymethylpachymaran, BCM-95, Lactofos, Pegfilgrastim, methadone, Varanadi ghrita, cisplatin; palifermin, cetuximab, cisplatin; lapatinib ditosylate, gefitinib, zalutumumab, erlotinib hydrochloride, beta carotene; E-Tabs, bevacizumab, levothyroxine; liothyronine sodium; recombinant human thryroid stimulating hormone, cisplatin; docetaxel; fluorouracil; hydroxyurea, fluorouracil, docetaxel; St. John's Wort, carboplatin; cisplatin; fluorouracil; paclitaxel, Biafine, methotrexate, cisplatin; fluorou racil, alpha tocopherol; isotretinoin; recombinant interferon alfa, panitumumab, cisplatin, bleomycin; fluorouracil; leucovorin; methotrexate; vincristine, nimotuzumab, panitumumab, amifostine; fluorouracil, cisplatin; docetaxel; fluorouracil, capecitabine; cisplatin; fluorouracil, pemetrexed disodium, cisplatin; gemcitabine, tranexamic acid, carboplatin; fluorouracil, cefazolin, epoetin alfa, tirapazamine, erlotinib hydrochloride, cetuximab; docetaxel; fluorouracil, megestrol, contusugene ladenovec, cevimeline hydrochloride, cisplatin; fluorouracil, cisplatin; fluorouracil; paclitaxel, isotretinoin, porfiromycin, escitalopram oxalate, gimeracil+oteracil+tegafur, IntraDose (Cisplatin Plus Epinephrine), misonidazole, tirapazamine, carboplatin; cisplatin; docetaxel; fluorouracil, gefitinib, epoetin alfa, paclitaxel, gefitinib, palifermin, pilocarpine, celecoxib, cisplatin; docetaxel; filgrastim; fluorouracil; paclitaxel, cisplatin; fluorouracil; leucovorin, cisplatin; gemcitabine; mannitol, Lactobacillus brevis CD2, Glutamine, carbogen; niacinamidem, cetuximab; cisplatin; docetaxel; fluorouracil, carbogen; carbon dioxide; niacinamide, cisplatin; docetaxel; fluorouracil, Soluble Beta Glucan, contusugene ladenovec, zalutumumab, talimogene laherparepvec, sucralfate, doxepin, methotrexate, amifostine, capsaicin, cisplatin; fluorouracil; panitumumab, aldesleukin, tranexamic acid, zinc sulfate, bacillus calmette-guerin [connaught] vaccine; bleomycin; cyclophosphamide; fluorouracil; methotrexate, amifostine, fluorouracil; hydroxyurea, bacitracin; clotrimazole; gentamicin, cyclophosphamide; doxorubicin, pelareorep, filgrastim, enteral nutrition, pentoxifylline, epirubicin; fluorouracil; leucovorin; mitomycin, porfiromycin, bleomycin; cisplatin; methotrexate; vincristine, bacillus calmette-guerin vaccine; isoniazid; methotrexate, fluorouracil; leucovorin; methotrexate, rAd-p53, PV-10, Leukocyte Interleukin, nimotuzumab, afatinib dimaleate, afatinib dimaleate; cisplatin, carboplatin; cetuximab; fluorouracil, cetuximab; cisplatin, nedaplatin, docetaxel; fluorouracil, nimorazole, gemcitabine hydrochloride, afatinib dimaleate, nedaplatin, contusugene ladenovec, Lactobacillus brevis CD2, cetuximab, nimotuzumab, E-10A, cisplatin; gemcitabine, cisplatin; lobaplatin, endostatin (recombinant)_dapsone; doxycycline; minocycline, carboplatin; cyclophosphamide; docetaxel; doxorubicin; paclitaxel, nivolumab, pelareorep, autologous stem cells; carboplatin; etoposide; ifosfamide, vinflunine ditartrate, gemcitabine, cisplatin; fluorouracil; mitomycin, porfiromycin, Olimel, pembrolizumab, AminoPure, nedaplatin, Liang Ge San, eicosapentaenoic acid, celecoxib; methotrexate, cisplatin; pembrolizumab, (tegafur uracil); cisplatin; epirubicin; mitomycin, durvalumab; tremelimumab, sodium hypochlorite, cetuximab; cisplatin, cisplatin; paclitaxel, amcasertib, capecitabine, R-TPR-033, VB-4847, gabapentin, raltitrexed, cisplatin; fluorouracil; leucovorin, cisplatin; docetaxel, celecoxib, durvalumab; durvalumab+tremelimumab, TT-10, (sodium alginate+sodium carbonate+propolis+aloe vera+calendula+honey+chamomile); cisplatin, pembrolizumab; talimogene laherparepvec, avelumab, nimorazole, eicosapentaenoic acid, lovastatin, dexamethasone; etoposide; gemcitabine; pegaspargase, ipilimumab; nivolumab, cetuximab; cisplatin; nivolumab, capecitabine; cisplatin; docetaxel, isotretinoin, carboplatin; cisplatin; gemcitabine; paclitaxel, erlotinib hydrochloride, VB-4847 (Proxinium Plus Best Supportive Care), celecoxib; thalidomide, cisplatin; fluorouracil, curcumin, celecoxib, imiquimod, cisplatin; cyclophosphamide; etoposide, sotatercept, cisplatin; docetaxel; fluorouracil, cetuximab; cisplatin; docetaxel, human endostatin, melatonin, epigallocatechin gallate, cisplatin; gemcitabine, gemcitabine; paclitaxel, (gimeracil+oteracil+tegafur), eicosapentaenoic acid; undisclosed nutritional supplement, celecoxib; methotrexate, pembrolizumab (Keytruda), afatinib dimaleate, cetuximab (Erbitux), durvalumab, durvalumab+tremelimumab, E-10A, entrectinib, Leukocyte Interleukin (Multikine), nimotuzumab, nivolumab (Opdivo), pelareorep (Reolysin), TT-10, vinflunine ditartrate (Javlor), acalabrutinib, AlloVax and alpelisib.

[0304] In some embodiments, the at least one additional pharmaceutically active ingredient is a compound, which is conventionally used in the treatment and/or prophylaxis of vulvar cancer, preferably vulvar squamous cell cancer (VSCC), more preferably advanced VSCC, even more preferably VSCC refractory to surgery or chemotherapy, most preferably advanced VSCC refractory to surgery or chemotherapy, wherein the compound is preferably selected from the group consisting of mitomycin-C2, cisplatin, carboplatin, vinorelbine, paclitaxel, a tyrosine kinase inhibitor (e.g. erlotinib), nivolumab, bleomycin sulfate (e.g. bleomycin, bleomycin sulfate, blenamax, tevableo, oncobleo, bleo, bloicin-5), 5-fluorouracil (5-FU), Gardasil 9 (human papillomavirus (9-valent) vaccine), omiganan pentahydrochloride, alisertib, ISA-101 (13 synthetic long peptides (25-35 amino acids long) derived from the E6 and E7 oncogenic proteins of the HPV 16 virus), PDS-0101, Vicoryx (P16_37-63 vaccine), TA-CIN (fusion protein vaccine comprising capsid protein L2, E6 and E7 from HPV16) and human papillomavirus 16 E6 peptide vaccine.

[0305] According to some embodiments, the at least one additional pharmaceutically active ingredient is a therapeutic peptide or protein (e.g. an antibody, a decoy receptor or a cytokine) or a fragment or variant thereof. Said therapeutic peptide or protein, or a fragment or variant thereof, may be provided as such or in the form of a nucleic acid (e.g. an RNA as described herein) encoding the therapeutic peptide or protein, or a fragment or variant thereof. It is further preferred that the therapeutic peptide or protein (e.g. an antibody, a decoy receptor or a cytokine) comprises a signal peptide, e.g. a secretory signal peptide. Such signal peptides are sequences, which typically exhibit a length of about 15 to 30 amino acids and are preferably located at the N-terminus of the encoded peptide, without being limited thereto. Signal peptides as defined herein preferably allow the localization of the therapeutic peptide or protein, or a fragment or variant thereof, to a certain cellular membrane or a certain cellular compartment, preferably the cell surface, the cytoplasmic membrane, the endoplasmic reticulum (ER) or the endosomal-lysosomal compartment.

[0306] In certain embodiments, the signal peptide may be selected from the list of amino acid sequences according to SEQ ID NOs: 1-1115 and SEQ ID NO: 1728 of the international patent application WO2017/081082, or fragments or variants of any of these sequences. On the nucleic acid level, any nucleic acid sequence (e.g. RNA sequence) may be selected, which encodes such amino acid sequences. In this context, the disclosure of WO2017/081082 is herewith incorporated by reference.

[0307] Examples of signal peptide sequences as defined herein include, without being limited thereto, signal sequences (or fragments or variants thereof) of classical or non-classical MHC-molecules (e.g. signal sequences of MHC I and II molecules, e.g. of the MHC class I molecule HLA-A*0201), cytokines or immunoglobulines as defined herein, the invariant chain of immunoglobulines or antibodies as defined herein, Lamp1, Tapasin, Erp57, Calretikulin, Calnexin, further membrane associated proteins, proteins associated with the endoplasmic reticulum (ER) or proteins associated with the endosomal-lysosomal compartment. Particularly preferred in the context of the present invention are the signal sequences of MHC class I molecule HLA-A*0201, or a fragment or variant thereof.

[0308] According to a preferred embodiment, the at least one additional pharmaceutically active ingredient is a therapeutic peptide or protein, or a fragment or variant thereof, comprising a signal sequence (or a fragment or variant thereof) derived from HLA-A2, HsPLAT, HsEPO, HsALB, IgE, HsCD5, HsIL2, HsCTRB2, human immunoglobulin heavy chain, human immunoglobulin light chain, GpLuc, Mice immunoglobulin kappa, NrChitl, CILp1.1, NgNep1, HsAzu1, HsCD33, VcCtxB, HsCST4, HsIns-iso1, HsSPARC, H₁N1(Netherlands2009), FV, MHCII or JEV.

[0309] It is further preferred that the at least one additional pharmaceutically active ingredient is a therapeutic peptide or protein (e.g. an antibody, a decoy receptor or a cytokine), or a fragment or variant thereof, comprising or consisting of an amino acid sequence according to any one of SEQ ID NO: 739-769, or a fragment or variant of any one of these amino acid sequences. Preferably, the at least one additional pharmaceutically active ingredient is a therapeutic peptide or protein (e.g. an antibody, a decoy receptor or a cytokine), or a fragment or variant thereof, comprising or consisting of an amino acid sequence identical or at least 50%, 60%, 70%, 75%, 80%, 81%, 82%, 83%, 84%, 85%, 86%, 87%, 88%, 89%, 90%, 91%, 92%, 93%, 94%, 95%, 96%, 97%, 98%, 99% identical to any one of SEQ ID NO: 739-769.

[0310] According to a particularly preferred embodiment, the at least one additional pharmaceutically active ingredient is a checkpoint modulator or a cytokine.

[0311] Negative regulatory T cell surface molecules were discovered, which are upregulated in activated T cells in order to dampen their activity, thus reducing the effectiveness of said activated T cells in the killing of tumor cells. These inhibitory molecules were termed negative co-stimulatory molecules due to their homology to the T cell co-stimulatory molecule CD28. These proteins, also referred to as immune checkpoint proteins, function in multiple pathways including the attenuation of early activation signals, competition for positive co-stimulation and direct inhibition of antigen presenting cells (Bour-Jordan et al., 2011. Immunol Rev. 241(1):180-205).

[0312] In the context of the present invention, a checkpoint modulator is typically a molecule, such as a protein (e.g. an antibody), a dominant negative receptor, a decoy receptor, or a ligand or a fragment or variant thereof, which modulates the function of an immune checkpoint protein, e.g. it inhibits or reduces the activity of checkpoint inhibitors (or inhibitory checkpoint molecules) or it stimulates or enhances the activity of checkpoint stimulators (or stimulatory checkpoint molecules). Therefore, checkpoint modulators as defined herein, influence the activity of checkpoint molecules.

[0313] In this context, inhibitory checkpoint molecules are defined as checkpoint inhibitors and can be used synonymously. In addition, stimulatory checkpoint molecules are defined as checkpoint stimulators and can be used synonymously.

[0314] Preferably, the checkpoint modulator is selected from agonistic antibodies, antagonistic antibodies, ligands, dominant negative receptors, and decoy receptors or combinations thereof.

[0315] Methods for generating and using mRNA-encoded antibodies are known in the art (e.g. WO2008/083949 or PCT/EP2017/060226).

[0316] Preferred inhibitory checkpoint molecules that may be inhibited by a checkpoint modulator in the context of the invention are PD-1, PD-L1, CTLA-4, PD-L2, LAG3, TIM3/HAVCR2, 2B4, A2aR, B7H3, B7H4, BTLA, CD30, CD160, CD155, GAL9, HVEM, IDO1, IDO2, KIR, LAIR1 and VISTA.

[0317] Preferred stimulatory checkpoint molecules that may be stimulated by a checkpoint modulator in the context of the invention are CD2, CD27, CD28, CD40, CD137, CD226, CD276, GITR, ICOS, OX40 and CD70.

[0318] According to a preferred embodiment, the isRNA is for use as described herein, wherein the use comprises—as an additional pharmaceutically active ingredient—a checkpoint modulator selected from the group consisting of the checkpoint modulator is selected from the group consisting of a PD-1 inhibitor, a PD-L1 inhibitor, a PD-L2 inhibitor, a CTLA-4 inhibitor, a LAG3 inhibitor, a TIM3 inhibitor, a TIGIT-inhibitor, an OX40 stimulator, a 4-1BB stimulator, a CD40L stimulator, a CD28 stimulator and a GITR stimulator.

[0319] According to a preferred embodiment, the checkpoint modulator as used herein targets a member of the PD-1 pathway. Members of the PD-1 pathway are typically proteins, which are associated with PD-1 signaling. On the one hand, this group comprises proteins, which induce PD-1 signaling upstream of PD-1 as e.g. the ligands of PD-1, PD-L1 and PD-L2, and the signal transduction receptor PD-1. On the other hand, this group comprises signal transduction proteins downstream of PD-1 receptor. Particularly preferred as members of the PD-1 pathway in the context of the present invention are PD-1, PD-L1 and PD-L2.

[0320] In the context of the present invention, a PD-1 pathway antagonist (or PD-1 inhibitor) is preferably defined herein as a compound capable to impair the PD-1 pathway signaling, preferably signaling mediated by the PD-1 receptor. Therefore, the PD-1 pathway antagonist may be any antagonist directed against any member of the PD-1 pathway capable of antagonizing PD-1 pathway signaling.

[0321] In a preferred embodiment, the checkpoint modulator used herein is a PD-1 inhibitor or a PD-L1 inhibitor, wherein the PD-1 inhibitor is preferably an antagonistic antibody directed against PD-1 and the PD-L1 inhibitor is preferably an antagonistic antibody directed against PD-L1.

[0322] In this context, the antagonist may be an antagonistic antibody as defined herein, targeting any member of the PD-1 pathway, preferably an antagonistic antibody directed against PD-1 receptor, PD-L1 or PD-L2. Such an antagonistic antibody may also be encoded by a nucleic acid. Also, the PD-1 pathway antagonist may be a fragment of the PD-1 receptor blocking the activity of PD1 ligands. B7-1 or fragments thereof may act as PD1-antagonizing ligands as well. Additionally, a PD-1 pathway antagonist may be a protein comprising (or a nucleic acid coding for) an amino acid sequence capable of binding to PD-1 but preventing PD-1 signaling, e.g. by inhibiting PD-1 and B7-H1 or B7-DL interaction (WO 2014/127917; WO2012062218).

[0323] Particularly preferred are the anti-PD1 antibodies Nivolumab (MDX-1106/BMS-936558/0N0-4538), (Brahmer et al., 2010. J Clin Oncol. 28(19):3167-75; PMID: 20516446); Pidilizumab (CT-011), (Berger et al., 2008. Clin Cancer Res. 14(10):3044-51; PMID: 18483370); Pembrolizumab (MK-3475, SCH 900475); AMP-224, and MEDI0680 (AMP-514).

[0324] Particularly preferred are also the anti-PD-L1 antibodies MDX-1105/BMS-936559 (Brahmer et al. 2012. N Engl J Med. 366(26):2455-65; PMID: 22658128); atezolizumab (MPDL3280A/RG7446); durvalumab (MEDI4736); and avelumab (MSB0010718).

[0325] In a further preferred embodiment the checkpoint modulator is a decoy receptor (e.g. a soluble receptor). Preferably, the decoy receptor is a soluble PD1 receptor. More preferably, the decoy receptor is a soluble variant of a PD-1 receptor or a fragment or variant thereof, wherein the PD-1 receptor is derived from a mammal, preferably selected from the group comprising, without being limited thereto, e.g. goat, cattle, swine, dog, cat, donkey, horse, monkey, ape, a rodent (such as a mouse, hamster, rabbit or rat), and, most preferably, human. Even more preferably, the decoy receptor is a soluble variant of a PD-1 receptor or a fragment or variant thereof, wherein the PD-1 receptor comprises an amino acid sequence identical or at least 50%, 60%, 70%, 75%, 80%, 81%, 82%, 83%, 84%, 85%, 86%, 87%, 88%, 89%, 90%, 91%, 92%, 93%, 94%, 95%, 96%, 97%, 98%, 99% identical to the amino acid sequence according to SEQ ID NO: 1, or a fragment or variant thereof. In a particularly preferred embodiment, the decoy receptor used herein as a checkpoint modulator is a soluble PD-1 receptor comprising an amino acid sequence identical or at least 50%, 60%, 70%, 75%, 80%, 81%, 82%, 83%, 84%, 85%, 86%, 87%, 88%, 89%, 90%, 91%, 92%, 93%, 94%, 95%, 96%, 97%, 98%, 99% identical to the amino acid sequence according to SEQ ID NO: 2, or a fragment or variant thereof.

[0326] According to another embodiment, the checkpoint modulator used herein is an OX40 stimulator. OX40 is a member of the TNFR-superfamily of receptors, and is expressed on the surface of antigen-activated mammalian CD4+ and CD8+ T lymphocytes. OX40 ligand (OX40L, also known as gp34, ACT-4-L, and CD252) is a protein that specifically interacts with the OX40 receptor. The term OX40L includes the entire OX40 ligand, soluble OX40 ligand, and fusion proteins comprising a functionally active portion of OX40 ligand covalently linked to a second moiety, e.g., a protein domain. Also included within the definition of OX40L are variants which vary in amino acid sequence from naturally occurring OX40L, but which retain the ability to specifically bind to the OX40 receptor. Further included within the definition of OX40L are variants thereof, which enhance the biological activity of OX40. An OX40 agonist is a molecule which induces or enhances the biological activity of OX40, e.g. signal transduction mediated by OX40. An OX40 agonist is preferably defined herein as a binding molecule capable of specific binding to OX40. Therefore, the OX40 agonist may be any agonist binding to OX40 and capable of stimulating OX40 signaling. In this context, the OX40 agonist may be an agonistic antibody binding to OX40.

[0327] OX40 agonists and anti-OX40 monoclonal antibodies are described in WO1995/021251, WO1995/012673 and WO1995/21915. Particularly preferred is the anti-OX40 antibody 9612, a murine anti-OX40 monoclonal antibody directed against the extracellular domain of human OX40 (Weinberg et al., 2006. J. Immunother. 29(6):575-585).

[0328] In another embodiment, the checkpoint modulator as used herein is an antagonistic antibody is selected from the group consisting of anti-CTLA4, anti-PD1, anti-PD-L1, anti-Vista, anti-Tim-3, anti-TIGIT, anti-LAG-3, and anti-BTLA. Preferably, an anti-CTLA4 antibody that may be used as a checkpoint modulator is directed against Cytotoxic T lymphocyte antigen-4 (CTLA-4). CTLA-4 is mainly expressed within the intracellular compartment of T cells. After a potent or long-lasting stimulus to a naive T cell via the T cell receptor (TCR), CTLA-4 is transported to the cell surface and concentrated at the immunological synapse. CTLA-4 then competes with CD28 for CD80/CD86 and down-modulates TCR signaling via effects on Akt signaling. Thus CTLA-4 functions physiologically as a signal dampener (Weber, J. 2010. Semin. Oncol. 37(5):430-9).

[0329] In preferred embodiments, the isRNA is for use as described herein, wherein the use comprises—as an additional pharmaceutically active ingredient—a CTLA4 antagonist, which is preferably an antagonistic antibody directed against CTLA4 (anti-CTLA4 antibody). The term ‘CTLA4 antagonist’ as used herein comprises any compound, such as an antibody, that antagonizes the physiological function of CTLA4. In the context of the present invention, the term ‘anti-CTLA4 antibody’ may refer to an antagonistic antibody directed against CTLA4 (or a functional fragment or variant of said antibody) or to a nucleic acid, preferably an RNA, encoding said antagonistic antibody (or a functional fragment thereof). A functional fragment or variant of an anti-CTLA4 antibody preferably acts as a CTLA4 antagonist. More preferably, the term ‘anti-CTLA4 antibody’ refers to a monoclonal antibody directed against CTLA4 (or a functional fragment or variant of such an antibody) or to a nucleic acid encoding a monoclonal antibody directed against CTLA4 (or a functional fragment or variant of such an antibody). The term ‘anti-CTLA4 antibody’ as used herein may refer to the heavy or light antibody chain, respectively, or also refer to both antibody chains (heavy and light chain), or to a fragment or variant of any one of these chains. Preferably, the fragment or variant of an anti-CTLA4 antibody as used herein is a functional fragment or variant, preferably as described herein.

[0330] Particularly preferred are the anti-CTLA-4 antibodies ipilimumab (Yervoy®), tremelimumab, and AGEN-1884. Further preferred anti-CTLA4 antibodies as used herein comprise BMS 734016; BMS-734016; BMS734016; MDX 010; MDX 101; MDX-010; MDX-101; MDX-CTLA-4; MDX-CTLA4; MDX010; Winglore; and Yervoy, or a functional fragment or variant of any one of these antibodies.

[0331] According to some embodiments, the checkpoint modulator as used herein is a CTLA4 antagonist, preferably an anti-CTLA4 antibody. Therein, the anti-CTLA4 antibody preferably comprises two polypeptide chains, typically referred to as ‘heavy chain’ and ‘light chain’, respectively. In a preferred embodiment, the heavy chain comprises or consists of an amino acid sequence according to any one of SEQ ID NO: 645, 832, 661 or 833, or a fragment or variant of any one of these amino acid sequences, preferably according to SEQ ID NO: 645, or a fragment or variant thereof. The heavy chain preferably comprises or consists of an amino acid sequence identical or at least 50%, 60%, 70%, 75%, 80%, 81%, 82%, 83%, 84%, 85%, 86%, 87%, 88%, 89%, 90%, 91%, 92%, 93%, 94%, 95%, 96%, 97%, 98%, 99% identical to any one of SEQ ID NO: 645, 832, 661 or 833, preferably to SEQ ID NO: 645. The light chain preferably comprises or consists of an amino acid sequence according to any one of SEQ ID NO: 677, 834, 693 or 706, or a fragment or variant of any one of these amino acid sequences, preferably according to SEQ ID NO: 677, or a fragment or variant thereof. More preferably, the light chain comprises or consists of an amino acid sequence identical or at least 50%, 60%, 70%, 75%, 80%, 81%, 82%, 83%, 84%, 85%, 86%, 87%, 88%, 89%, 90%, 91%, 92%, 93%, 94%, 95%, 96%, 97%, 98%, 99% identical to any one of SEQ ID NO: 677, 834, 693 or 706, preferably to SEQ ID NO: 677. In preferred embodiments, the anti-CTLA4 antibody thus comprises a heavy chain and a light chain as described above, or a fragment or variant of each of these chains. Most preferably, the anti-CTLA4 antibody comprises a heavy chain and a light chain, or a fragment or variant thereof, wherein the heavy chain, or the fragment or variant thereof, comprises or consists of an amino acid sequence according to SEQ ID NO: 645, or a fragment or variant thereof, and wherein the light chain, or the fragment or variant thereof, comprises or consists of an amino acid sequence according to SEQ ID NO: 677, or a fragment or variant thereof.

[0332] According to a further embodiment, the checkpoint modulator as used herein is at least one antibody described in Table 1 or a fragment or variant thereof

TABLE 1
Antibodies directed against checkpoint molecules

| Name | Target |
|---|---|
| Urelumab | 4-1BB/CD137 |
| PF-05082566 | 4-1BB/CD137 |
| 8H9 | B7-H3 |
| Enoblituzumab | B7-H3 |
| Ipilimumab | CD152/CTLA-4 |
| Ticilimumab (=tremelimumab) | CD152/CTLA-4 |
| Tremelimumab | CD152/CTLA-4 |
| Varlilumab | CD27 |
| Teneliximab | CD40 |
| Vorsetuzumab mafodotin | CD70 |
| Lirilumab | KIR2D |
| GSK-3174998 | OX40 |
| MEDI-6469 | OX40 |
| MEDI-6383 | OX40 |
| MEDI-0562 | OX40 |
| PF-04518600 | OX40 |
| RG-7888 | OX40 |
| PF-06801591 | PD-1 |
| BGBA-317 | PD-1 |
| MEDI-0680 | PD-1 |
| MK-3475 | PD-1 |
| Nivolumab | PD-1 |
| PDR-001 | PD-1 |
| Pembrolizumab | PD-1 |
| Pidilizumab | PD-1 |
| REGN-2810 | PD-1 |
| SHR-1210 | PD-1 |
| TSR-042 | PD-1 |
| MDX-1106 | PD-1 |
| Merck 3745 | PD-1 |
| CT-011 | PD-1 |
| MEDI-0680 | PD-1 |
| PDR001 | PD-1 |
| REGN2810 | PD-1 |
| BGB-108 | PD-1 |
| BGB-A317 | PD-1 |
| AMP-224 | PD-1 |
| Atezolizumab | PD-L1 (CD274) |
| Avelumab | PD-L1 (CD274) |
| BMS-936559 | PD-L1 (CD274) |
| Durvalumab | PD-L1 (CD274) |
| MEDI-4736 | PD-L1 (CD274) |
| MPDL33280A | PD-L1 (CD274) |
| YW243.55.S70 | PD-L1 (CD274) |
| MDX-1105 | PD-L1 (CD274) |
| MSB0010718C | PD-L1 (CD274) |

[0333] According to a preferred embodiment, the at least one additional pharmaceutically active ingredient is a cytokine.

[0334] More preferably, the at least one additional pharmaceutically active ingredient is IL-12 or a fragment or variant thereof. Even more preferably, the at least one additional pharmaceutically active ingredient is an IL-12 analog or a fragment or variant thereof. Most preferably, the at least one additional pharmaceutically active ingredient is a compound, such as a peptide or a protein, a mutated peptide or a mutated protein, a coupled heterodimer, an antibody, preferably an antibody encoded by RNA, or artificial binding domains, which binds to IL-12 receptor and preferably leads to activation of the JAK-STAT signaling pathway. In a preferred embodiment, the at least one additional pharmaceutically active ingredient is an IL-12 receptor agonist.

[0335] Naturally occurring IL-12 is typically a heterodimeric cytokine encoded by two separate genes, IL-12A (p35) and IL-12B (p40). The naturally occurring heterodimer is also referred to as p70. In the context of the present invention, the term “IL-12” refers to a protein consisting of or comprising a naturally occuring form of heterodimeric IL-12, a monomeric IL-12A, a monomeric IL-12B as well as fragments or variants of any of these, such as fusions of IL-12A, or a fragment or variant thereof, with IL-12B, or a fragment or variant thereof, wherein said protein may also comprise an amino acid sequence that is not related to IL-12A or IL-12B. For example, the term “IL-12” as used herein also comprises a protein comprising IL-12A, or a fragment or variant thereof, IL-12B, or a fragment or variant thereof, wherein the IL-12A, or a fragment or variant thereof, is covalently linked to the IL-12B, or a fragment or variant thereof, by a linker, wherein the linker is preferably an amino acid sequence not related to IL-12A or IL-12B. More preferably, the linker is a peptide or protein linker, which preferably comprises an amino acid sequence according to SEQ ID NO: 9 or a fragment or variant thereof. Further, the term “IL-12” also comprises a protein, wherein IL-12A, or a fragment or variant thereof, is directly linked to the IL-12B, or a fragment or variant thereof, preferably via covalent linkage, more preferably via a peptide bond. In addition, the terms “IL-12” or “IL-12 analog” as used herein also comprise any compound, such as a peptide or a protein, a mutated peptide or a mutated protein, a coupled heterodimer, an antibody, preferably an antibody encoded by RNA, or artificial binding domains, which binds to an IL-12 receptor and which preferably leads to activation of the JAK-STAT signaling pathway. Hence, the terms “IL-12” or “IL-12 analog” as used herein also comprise a compound, such as a peptide or protein, that functions as an IL-12 receptor agonist.

[0336] As used herein, a fragment or variant of IL-12 as defined herein is preferably able to specifically bind to an IL-12 receptor and, more preferably, to function as an IL-12 receptor agonist.

[0337] According to a preferred embodiment, the IL-12 as used in the context of the present invention is derived from a mammal, preferably selected from the group comprising, without being limited thereto, e.g. goat, cattle, swine, dog, cat, donkey, horse, monkey, ape, a rodent (such as a mouse, hamster, rabbit or rat), and, most preferably, human. Even more preferably, the IL-12 as used herein comprises an amino acid sequence identical or at least 50%, 60%, 70%, 75%, 80%, 81%, 82%, 83%, 84%, 85%, 86%, 87%, 88%, 89%, 90%, 91%, 92%, 93%, 94%, 95%, 96%, 97%, 98%, 99% identical to any one of the amino acid sequences according to SEQ ID NO: 3 to 8, or a fragment or variant of any of these sequences. Alternatively or in addition, the IL-12 as used herein comprises an amino acid sequence identical or at least 50%, 60%, 70%, 75%, 80%, 81%, 82%, 83%, 84%, 85%, 86%, 87%, 88%, 89%, 90%, 91%, 92%, 93%, 94%, 95%, 96%, 97%, 98%, 99% identical to the amino acid sequence according to SEQ ID NO: 9, or a fragment or variant thereof. In a particularly preferred embodiment, the IL-12 as used herein comprises an amino acid sequence identical or at least 50%, 60%, 70%, 75%, 80%, 81%, 82%, 83%, 84%, 85%, 86%, 87%, 88%, 89%, 90%, 91%, 92%, 93%, 94%, 95%, 96%, 97%, 98%, 99% identical to the amino acid sequence according to SEQ ID NO: 10, or a fragment or variant thereof.

[0338] In an alternative embodiment, the at least one additional pharmaceutically active ingredient is CD40L or a fragment or variant thereof. CD40L (also known as “CD40 ligand”, as “CD40LG” or as “CD154”) is primarily expressed on activated T and B cells. CD40L binds to CD40, which is typically expressed on antigen-presenting cells (APC). The interaction of CD40 and CD40L plays a pivotal role in the development of humoral and cellular immune responses. As used herein, the term “CD40L” refers to a naturally occurring CD40L protein or to a fragment or variant thereof, wherein the fragment or variant is preferably able to specifically bind to a CD40.

[0339] According to a preferred embodiment, the CD40L as used in the context of the present invention is derived from a mammal, preferably selected from the group comprising, without being limited thereto, e.g. goat, cattle, swine, dog, cat, donkey, horse, monkey, ape, a rodent (such as a mouse, hamster, rabbit or rat), and, most preferably, human. Even more preferably, the CD40L as used herein comprises an amino acid sequence identical or at least 50%, 60%, 70%, 75%, 80%, 81%, 82%, 83%, 84%, 85%, 86%, 87%, 88%, 89%, 90%, 91%, 92%, 93%, 94%, 95%, 96%, 97%, 98%, 99% identical to the amino acid sequence according to SEQ ID NO: 11, or a fragment or variant thereof.

[0340] According to a particularly preferred embodiment the at least one additional pharmaceutically active ingredient is a tumour antigen preferably selected from any tumor antigen comprising an amino acid sequence selected from the group consisting of SEQ ID NOs: 1-504; 4558-4560 of PCT/EP2017/059525, or a fragment or variant of any one of said amino acid sequences.

[0341] In a preferred embodiment, the present invention thus provides the isRNA for use in the treatment of a tumor or cancer disease as described herein, wherein the treatment comprises administration of at least one coding RNA (as additional pharmaceutically active ingredient) encoding at least one tumor antigen, preferably at least one mRNA, wherein the at least one coding sequence comprises a nucleic acid sequence selected from the group consisting of SEQ ID Nos. 505-4033; 4561-4591 of PCT/EP2017/059525, or a fragment or variant of any one of said sequences.

[0342] More preferably, the tumor antigen is selected from the group consisting of 1A01_HLA-A/m; 1A02; 5T4; ACRBP; AFP; AKAP4; alpha-actinin-_4/m; alpha-methylacyl-coenzyme_A_racemase; ANDR; ART-4; ARTC1/m; AURKB; B2MG; B3GN5; B4GN1; B7H4; BAGE-1; BASI; BCL-2; bcr/abl; beta-catenin/m; BING-4; BIRC7; BRCA1/m; BY55; calreticulin; CAMEL; CASP-8/m; CASPA; cathepsin_B; cathepsin_L; CD1A; CD1B; CD1C; CD1D; CD1E; CD20; CD22; CD276; CD33; CD3E; CD3Z; CD44_Isoform_1; CD44_Isoform_6; CD4; CD52; CD55; CD56; CD80; CD86; CD8A; CDC27/m; CDE30; CDK4/m; CDKN2A/m; CEA; CEAM6; CH3L2; CLCA2; CML28; CML66; COA-1/m; coactosin-like_protein; collagen_XXIII; COX-2; CP1B1; CSAG2; CT45A1; CT55; CT-_9/BRD6; CTAG2_Isoform_LAGE-1A; CTAG2_Isoform_LAGE-1B; CTCFL; Cten; cyclin_B1; cyclin_D1; cyp-B; DAM-10; DEP1A; E7; EF1A2; EFTUD2/m; EGFR; EGLN3; ELF2/m; EMMPRIN; EpCam; EphA2; EphA3; ErbB3; ERBB4; ERG; ETV6; EWS; EZH2; FABP7; FCGR3A_Version_1; FCGR3A_Version_2; FGF5; FGFR2; fibronectin; FOS; FOXP3; FUT1; G250; GAGE-1; GAGE-2; GAGE-3; GAGE-4; GAGE-5; GAGE-6; GAGE7b; GAGE-8_(GAGE-2D); GASR; GnT-V; GPC3; GPNMB/m; GRM3; HAGE; hepsin; Her2/neu; HLA-A2/m; homeobox_NKX3.1; HOM-TES-85; HPG1; HS71A; HS71B; HST-2; hTERT; iCE; IF2B3; IL10; IL-13Ra2; IL2-RA; IL2-RB; IL2-RG; IL-5; IMP3; ITA5; ITB1; ITB6; kallikrein-2; kallikrein-3; kallikrein-4; KI20A; KIAA0205; KIF2C; KK-LC-1; LDLR; LGMN; LIRB2; LY6K; MAGA5; MAGA8; MAGAB; MAGE-A10; MAGE-A12; MAGE-A1; MAGE-A2; MAGE-A3; MAGE-A4; MAGE-A6; MAGE-A9; MAGE-B10; MAGE-B16; MAGE-B17; MAGE-_131; MAGE-B2; MAGE-B3; MAGE-B4; MAGE-B5; MAGE-B6; MAGE-C1; MAGE-C2; MAGE-C3; MAGE-D1; MAGE-D2; MAGE-D4; MAGE-_E1; MAGE-E1_(MAGE1); MAGE-E2; MAGE-F1; MAGE-H₁; MAGEL2; mammaglobin_A; MART-1/melan-A; MART-2; MC1_R; M-CSF; mesothelin; MITF; MMP1_1; MMP7; MUC-1; MUM-1/m; MUM-2/m; MYCN; MYO1A; MYO1B; MYO1C; MYO1D; MYO1E; MYO1F; MYO1G; MYO1H; NA17; NA88-A; Neo-PAP; NFYC/m; NGEP; NPM; NRCAM; NSE; NUF2; NY-ESO-1; OA1; OGT; OS-9; osteocalcin; osteopontin; p53; PAGE-4; PAI-1; PAI-2; PAP; PATE; PAX3; PAXS; PD1L1; PDCD1; PDEF; PECA1; PGCB; PGFRB; Pim-1_-Kinase; Pin-1; PLAC1; PMEL; PML; POTEF; POTE; PRAME; PRDX5/m; PRM2; prostein; proteinase-3; PSA; PSB9; PSCA; PSGR; PSM; PTPRC; RAB8A; RAGE-1; RARA; RASH; RASK; RASN; RGSS; RHAMM/CD168; RHOC; RSSA; RU1; RU2; RUNX1; S-100; SAGE; SART-_1; SART-2; SART-3; SEPR; SERPINBS; SIA7F; SIA8A; SIAT9; SIRT2/m; SOX10; SP17; SPNXA; SPXN3; SSX-1; SSX-2; SSX3; SSX-4; ST1A1; STAG2; STAMP-1; STEAP-1; Survivin-2B; survivin; SYCP1; SYT-SSX-1; SYT-SSX-2; TARP; TCRg; TF2AA; TGFB1; TGFR2; TGM-4; TIE2; TKTL1; TPI/m; TRGV11; TRGV9; TRPC1; TRP-p8; TSG10; TSPY1; TVC_(TRGV3); TX101; tyrosinase; TYRP1; TYRP2; UPA; VEGFR1; WT1; and XAGE1.

[0343] In preferred embodiments, a tumor antigen, preferably as defined herein, is provided in the form of at least one coding RNA, preferably as defined herein, which comprises at least one coding sequence encoding a peptide or protein comprising a tumor antigen, or a fragment or variant thereof. Said at least one coding RNA comprising at least one coding sequence encoding a peptide or protein comprising a tumor antigen, or a fragment or variant thereof, may preferably be administered intratumorally. Alternatively, said at least one coding RNA may be administered intradermally, intramuscularly or subcutaneously.

[0344] In a preferred embodiment, the at least one additional pharmaceutically active ingredient used herein is a coding RNA, preferably an mRNA. Hence, according to certain embodiments, the invention provides an isRNA for use in the treatment of a tumor or cancer disease as described herein, wherein the treatment further comprises administration of at least one coding RNA, preferably at least one mRNA, wherein the isRNA is preferably administered intratumorally (e.g. locoregionally). In a particularly preferred embodiment, the coding RNA, preferably an mRNA, is administered intratumorally (e.g. locoregionally). More preferably, the isRNA as well as the at least one coding RNA are administered intratumorally (e.g. locoregionally).

[0345] In a preferred embodiment, the at least one additional pharmaceutically active ingredient used herein is a coding RNA, preferably an mRNA. Hence, according to certain embodiments, the invention provides an isRNA for use in the treatment of a tumor or cancer disease as described herein, wherein the treatment further comprises administration of at least one coding RNA, preferably at least one mRNA, wherein the isRNA is preferably administered intratu morally. In a particularly preferred embodiment, the coding RNA, preferably an mRNA, is administered intratumorally. More preferably, the isRNA as well as the at least one coding RNA are administered intratumorally.

[0346] In some embodiments, the at least one coding RNA is formulated together with the isRNA for use as described herein. In a particularly preferred embodiment, the at least one coding RNA is formulated separately from the isRNA, wherein the at least one coding RNA as well as the isRNA are preferably administered intratumorally (e.g. locoregionally).

[0347] According to a preferred embodiment, the isRNA is formulated together with the at least one coding RNA, wherein the co-formulation is preferably administered intratumorally (e.g. locoregionally).

[0348] In some embodiments, the at least one coding RNA is formulated together with the isRNA for use as described herein. In a particularly preferred embodiment, the at least one coding RNA is formulated separately from the isRNA, wherein the at least one coding RNA as well as the isRNA are preferably administered intratumorally.

[0349] According to a preferred embodiment, the isRNA is formulated together with the at least one coding RNA, wherein the co-formulation is preferably administered intratumorally.

[0350] According to a preferred embodiment, the at least one coding RNA encodes at least one peptide or protein comprising at least one of the peptides or proteins described herein as an additional pharmaceutically active ingredient. More preferably, the at least one coding RNA encodes at least one peptide or protein comprising at least one peptide or protein selected from the group consisting of
[0351] IL-12,
[0352] CD40L and
[0353] a decoy PD-1 receptor, preferably a soluble PD-1 receptor,

[0354] or a fragment or variant of any of these,

[0355] wherein the IL-12, the CD40L or the decoy PD-1 receptor, or a fragment or variant of any of these, is preferably as described herein. Even more preferably, the at least one coding RNA encodes at least one peptide or protein comprising at least one peptide or protein selected from the group consisting of
[0356] IL-12,
[0357] CD40L,
[0358] a decoy PD-1 receptor, preferably a soluble PD-1 receptor, and
[0359] an anti-CTLA4 antibody,

[0360] or a fragment or variant of any of these,

[0361] wherein the IL-12, the CD40L, the decoy PD-1 receptor, or the anti-CTLA4 antibody, or a fragment or variant of any of these, is preferably as described herein.

[0362] Alternatively, the at least one coding RNA encodes at least one peptide or protein comprising at least one peptide or protein selected from the group consisting of
[0363] IL-12,
[0364] CD40L, and
[0365] an anti-CTLA4 antibody,

[0366] or a fragment or variant of any of these,

[0367] wherein the IL-12, the CD40L, or the anti-CTLA4 antibody, or a fragment or variant of any of these, is preferably as described herein.

[0368] According to a preferred embodiment, the invention provides an isRNA for use in the treatment of a tumor or cancer disease,

[0369] wherein the isRNA comprises a nucleic acid sequence according to formula (I) (GₗXₘGₙ), formula (II) (CₗXₘCₙ), formula (III) (NᵤGₗXₘGₙNᵥ)ₐ or formula (IV) (NᵤCₗXₘCₙNᵥ)ₐ, preferably at least one nucleic acid sequence according to any one of SEQ ID NOs: 433 to 434, 1014 to 1016, or a fragment or variant of any of these sequences, wherein the isRNA is complexed with a cationic or polycationic compound, preferably with a polymeric carrier, more preferably with a polymeric carrier that is formed by a disulfide-crosslinked cationic component, which preferably comprises a peptide according to formula (V), (Va) and/or (Vb) and/or a compound according to formula (VI), more preferably at least one of the disulfide-crosslinked cationic peptides Cys-Arg₁₂ (SEQ ID NO: 580), Cys-Arg₁₂-Cys (SEQ ID NO: 579), or Trp-Arg₁₂-Cys (SEQ ID NO: 1074),

[0370] wherein the isRNA is preferably administered intratumorally,

[0371] wherein the treatment of a tumor or cancer disease comprises administration of at least one coding RNA, preferably at least one mRNA, encoding at least one peptide or protein comprising at least one peptide or protein selected from the group consisting of
[0372] IL-12,
[0373] CD40L and
[0374] a decoy PD-1 receptor, preferably a soluble PD-1 receptor,

[0375] or a fragment or variant of any of these,

[0376] wherein the IL-12, the CD40L or the decoy PD-1 receptor, or a fragment or variant of any of these, is preferably as described herein.

[0377] According to a particularly preferred embodiment, the invention provides an isRNA for use in the treatment of a tumor or cancer disease,

[0378] wherein the isRNA comprises a nucleic acid sequence according to formula (I) (GₗXₘGₙ), formula (II) (CₗXₘCₙ), formula (III) (NᵤGₗXₘGₙNᵥ)ₐ or formula (IV) (NᵤCₗXₘCₙNᵥ)ₐ, preferably at least one nucleic acid sequence according to any one of SEQ ID NOs: 433 to 437, 1014 to 1016, 1055 or 1056, or a fragment or variant of any of these sequences, wherein the isRNA is complexed with a cationic or polycationic compound, preferably with a polymeric carrier, more preferably with a polymeric carrier that is formed by a disulfide-crosslinked cationic component, which preferably comprises a peptide according to formula (V), (Va) and/or (Vb) and/or a compound according to formula (VI), more preferably at least one of the disulfide-crosslinked cationic peptides Cys-Arg₁₂ (SEQ ID NO: 580), Cys-Arg₁₂-Cys (SEQ ID NO: 579), or Trp-Arg₁₂-Cys (SEQ ID NO: 1074),

[0379] wherein the isRNA is preferably administered intratumorally,

[0380] wherein the tumor or cancer disease is preferably selected from the group consisting of melanoma, preferably advanced and/or metastatic melanoma, most preferably advanced cutaneous melanoma (cMEL), squamous cell cancer of the skin (SCC), preferably unresectable and/or advanced SCC, most preferably cutaneous squamous cell carcinoma (cSCC), or other forms of malignant skin cancer, adenocystic carcinoma (ACC), preferably advanced ACC, cutaneous T-cell lymphoma, preferably advanced cutaneous T-cell lymphoma, and squamous cell carcinoma of the head and neck (HNSCC), preferably advanced HNSCC;

[0381] wherein the treatment of a tumor or cancer disease comprises administration of at least one coding RNA, preferably at least one mRNA, encoding at least one peptide or protein comprising at least one peptide or protein selected from the group consisting of
[0382] IL-12,
[0383] CD40L and
[0384] a decoy PD-1 receptor, preferably a soluble PD-1 receptor,

[0385] or a fragment or variant of any of these, and

[0386] wherein the IL-12, the CD40L or the decoy PD-1 receptor, or a fragment or variant of any of these, is preferably as described herein.

[0387] According to a further preferred embodiment, the invention provides an isRNA for use in the treatment of a tumor or cancer disease,

[0388] wherein the isRNA comprises a nucleic acid sequence according to formula (I) (GₗXₘGₙ), formula (II) (CₗXₘCₙ), formula (III) (NᵤGₗXₘGₙNᵥ)ₐ or formula (IV) (NᵤCₗXₘCₙNᵥ)ₐ, preferably at least one nucleic acid sequence according to any one of SEQ ID NOs: 433 to 437, 1014 to 1016 or 1055 or 1056, more preferably according to any one of SEQ ID NO: 433,434 or 1014 to 1016, or a fragment or variant of any of these sequences,

[0389] wherein the isRNA is complexed with a cationic or polycationic compound, preferably with a polymeric carrier, more preferably with a polymeric carrier that is formed by a disulfide-crosslinked cationic component, which preferably comprises a peptide according to formula (V), (Va) and/or (Vb) and/or a compound according to formula (VI), more preferably at least one of the disulfide-crosslinked cationic peptides Cys-Arg₁₂ (SEQ ID NO: 580), Cys-Arg₁₂-Cys (SEQ ID NO: 579), or Trp-Arg₁₂-Cys (SEQ ID NO: 1074),

[0390] wherein the isRNA is preferably administered intratumorally, including peritumorally or locoregionally, wherein the treatment of a tumor or cancer disease comprises administration of at least one coding RNA, preferably at least one mRNA, encoding at least one peptide or protein comprising at least one peptide or protein selected from the group consisting of
[0391] IL-12,
[0392] CD40L,
[0393] an anti-CTLA4 antibody, and
[0394] optionally, a decoy PD-1 receptor, preferably a soluble PD-1 receptor,

[0395] or a fragment or variant of any of these,

[0396] wherein the IL-12, the CD40L, the decoy PD-1 receptor, or the anti-CTLA4 antibody, or a fragment or variant of any of these, is preferably as described herein.

[0397] According to a particularly preferred embodiment, the invention provides an isRNA for use in the treatment of a tumor or cancer disease,

[0398] wherein the isRNA comprises a nucleic acid sequence according to formula (I) (GₗXₘGₙ), formula (II) (CₗXₘCₙ), formula (III) (NᵤGₗXₘGₙNᵥ)ₐ or formula (IV) (NᵤCₗXₘCₙNᵥ)ₐ, preferably at least one nucleic acid sequence according to any one of SEQ ID NOs: 433 to 437, 1014 to 1016, preferably according to any one of SEQ ID NOs: 433, 434 or 1014 to 1016, or a fragment or variant of any of these sequences,

[0399] wherein the isRNA is complexed with a cationic or polycationic compound, preferably with a polymeric carrier, more preferably with a polymeric carrier that is formed by a disulfide-crosslinked cationic component, which preferably comprises a peptide according to formula (V), (Va) and/or (Vb) and/or a compound according to formula (VI), more preferably at least one of the disulfide-crosslinked cationic peptides Cys-Arg₁₂ (SEQ ID NO: 580), Cys-Arg₁₂-Cys (SEQ ID NO: 579), or Trp-Arg₁₂-Cys (SEQ ID NO: 1074),

[0400] wherein the isRNA is preferably administered intratumorally, including peritumorally or locoregionally,

[0401] wherein the tumor or cancer disease is preferably selected from the group consisting of
[0402] melanoma, preferably advanced and/or metastatic melanoma, more preferably advanced cutaneous melanoma (cMEL);
[0403] squamous cell cancer (SCC) of the skin, preferably unresectable and/or advanced SCC of the skin, more preferably cutaneous squamous cell carcinoma (cSCC), even more preferably unresectable and/or advanced cSCC;
[0404] squamous cell carcinoma of the head and neck (HNSCC), preferably advanced HNSCC, more preferably immunotherapy-refractory or platinum-refractory HNSCC, even more preferably immunotherapy-refractory advanced HNSCC or platinum-refractory advanced HNSCC;
[0405] adenocystic carcinoma (ACC), preferably advanced ACC;
[0406] cutaneous T-cell lymphoma, preferably advanced cutaneous T-cell lymphoma or cutaneous T-cell lymphoma of mycosis fungoides subtype, more preferably cutaneous T-cell lymphoma refractory to local treatment or to chemotherapy, even more preferably advanced cutaneous T-cell lymphoma refractory to local treatment or to chemotherapy, or cutaneous T-cell lymphoma of mycosis fungoides subtype refractory to local treatment or to chemotherapy, and
[0407] vulvar cancer, preferably vulvar squamous cell cancer (VSCC), more preferably advanced VSCC, even more preferably VSCC refractory to surgery or chemotherapy, most preferably advanced VSCC refractory to surgery or chemotherapy; or

[0408] selected from the group consisting of cutaneous melanoma (cMEL), cutaneous squamous cell carcinoma (cSCC), head and neck squamous cell carcinoma (HNSCC), adenoid cystic carcinoma (ACC), cutaneous T-cell lymphoma, preferably cutaneous T-cell lymphoma of mycosis fungoides subtype, and vulvar squamous cell cancer (VSCC);

[0409] wherein the tumor or the cancer disease is preferably at an advanced stage and/or refractory to standard therapy;

[0410] wherein the treatment of a tumor or cancer disease comprises administration of at least one coding RNA, preferably at least one mRNA, encoding at least one peptide or protein comprising at least one peptide or protein selected from the group consisting of
[0411] IL-12,
[0412] CD40L,
[0413] an anti-CTLA4 antibody, and
[0414] optionally, a decoy PD-1 receptor, preferably a soluble PD-1 receptor,

[0415] or a fragment or variant of any of these,

[0416] wherein the IL-12, the CD40L, the decoy PD-1 receptor, or the anti-CTLA4 antibody, or a fragment or variant of any of these, is preferably as described herein.

[0417] According to preferred embodiments of the invention, the treatment or prophylaxis of a cancer or tumor disease as described herein comprises administration of a decoy PD-1 receptor as described herein in cases, where the subject does not receive or has not received a treatment with a PD-1 antagonist and/or a PD-L1 antagonist. In cases, where the patient does not receive or has not received anti PD-1 and/or anti PD-L1 treatment (e.g. an anti PD-1 antibody or an anti PD-L1 antibody) it is particularly preferred that the at least one mRNA encodes a decoy PD-1 receptor.

[0418] In other cases, where the subject receives or has received a treatment with a PD-1 or PD-L1 antagonist, the treatment or prophylaxis of a cancer or tumor disease as envisaged herein does preferably not comprise the administration of a decoy PD-1 receptor as described herein or a nucleic acid encoding a decoy PD-1 receptor or a fragment or variant thereof.

[0419] According to a preferred embodiment, the treatment of a tumor or cancer disease in a subject that receives or has received a treatment with a PD-1 or a PD-L1 antagonist comprises administration of at least one coding RNA, preferably at least one mRNA, encoding at least one peptide or protein comprising at least one peptide or protein selected from the group consisting of
[0420] IL-12,
[0421] CD40L, and
[0422] an anti-CTLA4 antibody,

[0423] or a fragment or variant of any of these,

[0424] wherein the IL-12, the CD40L, or the anti-CTLA4 antibody, or a fragment or variant of any of these, is preferably as described herein.

[0425] In further preferred embodiments, the treatment of a tumor or cancer disease in a subject that does not receive or has not received a treatment with a PD-1 or a PD-L1 antagonist comprises administration of at least one coding RNA, preferably at least one mRNA, encoding at least one peptide or protein comprising at least one peptide or protein selected from the group consisting of
[0426] IL-12,
[0427] CD40L, and
[0428] an anti-CTLA4 antibody, and
[0429] a decoy PD-1 receptor, preferably a soluble PD-1 receptor,

[0430] or a fragment or variant of any of these,

[0431] wherein the IL-12, the CD40L, the anti-CTLA4 antibody, or the decoy PD-1 receptor, or a fragment or variant of any of these, is preferably as described herein.

[0432] According to a preferred embodiment, the at least one coding RNA encodes a peptide or protein comprising IL-12 or a fragment or variant thereof as defined herein. In some embodiments, the at least one coding RNA encodes a peptide or protein, a mutated peptide or a mutated protein, a coupled heterodimer, an antibody, preferably an antibody encoded by RNA, or artificial binding domains comprising an IL-12 analog or a fragment or variant thereof as defined herein. Preferably, the encoded peptide or protein comprises an amino acid according to any one of SEQ ID NO: SEQ ID NO: 3 to 8, or a fragment or variant of any of these sequences. The encoded peptide or protein may preferably also comprise an amino acid sequence according to SEQ ID NO: 9, or a fragment or variant thereof. More preferably, the encoded peptide or protein comprises an amino acid according to SEQ ID NO: 10, or a fragment or variant thereof.

[0433] Most preferably, the encoded peptide or protein comprises an amino acid sequence identical or at least 50%, 60%, 70%, 75%, 80%, 81%, 82%, 83%, 84%, 85%, 86%, 87%, 88%, 89%, 90%, 91%, 92%, 93%, 94%, 95%, 96%, 97%, 98%, 99% identical to any one of the amino acid sequences according to SEQ ID NO: 3 to 8, or a fragment or variant of any of these sequences. In a particularly preferred embodiment, the encoded peptide or protein comprises an amino acid sequence identical or at least 50%, 60%, 70%, 75%, 80%, 81%, 82%, 83%, 84%, 85%, 86%, 87%, 88%, 89%, 90%, 91%, 92%, 93%, 94%, 95%, 96%, 97%, 98%, 99% identical to the amino acid sequence according to SEQ ID NO: 10, or a fragment or variant thereof.

[0434] In a further preferred embodiment, the at least one coding RNA encodes a peptide or protein comprising IL-12 or a fragment or variant thereof as defined herein, wherein the at least one coding RNA comprises a nucleic acid sequence according to any one of SEQ ID NO: 14 to 19 or 21 or SEQ ID NOs: 440 to 445 or 447, preferably any one of SEQ ID NOs: 440 to 445 or 447, or a fragment or variant of any of these sequences. More preferably, the at least one coding RNA encodes a peptide or protein comprising IL-12 or a fragment or variant thereof as defined herein, wherein the at least one coding RNA comprises a nucleic acid sequence identical or at least 50%, 60%, 70%, 75%, 80%, 81%, 82%, 83%, 84%, 85%, 86%, 87%, 88%, 89%, 90%, 91%, 92%, 93%, 94%, 95%, 96%, 97%, 98%, 99% identical to any one of the nucleic acid sequences according to SEQ ID NO: 14 to 19 or 21 or SEQ ID NOs: 440 to 445 or 447, preferably any one of SEQ ID NOs: 440 to 445 or 447, or a fragment or variant of any of these sequences.

[0435] Alternatively or in addition, the at least one coding RNA encodes a peptide or protein comprising IL-12 or a fragment or variant thereof as defined herein, wherein the at least one coding RNA comprises a nucleic acid sequence according to SEQ ID NO: 20 or 446, preferably according to SEQ ID NO: 446, or a fragment or variant of any of these sequences. More preferably, the at least one coding RNA encodes a peptide or protein comprising IL-12 or a fragment or variant thereof as defined herein, wherein the at least one coding RNA comprises a nucleic acid sequence identical or at least 50%, 60%, 70%, 75%, 80%, 81%, 82%, 83%, 84%, 85%, 86%, 87%, 88%, 89%, 90%, 91%, 92%, 93%, 94%, 95%, 96%, 97%, 98%, 99% identical to a nucleic acid sequence according to SEQ ID NO: 20 or 446, preferably according to SEQ ID NO: 446, or a fragment or variant of any of these sequences.

[0436] In a particularly preferred embodiment, the at least one coding RNA encodes a peptide or protein comprising IL-12 or a fragment or variant thereof as defined herein, wherein the at least one coding RNA comprises a nucleic acid sequence according to SEQ ID NO: 21 or SEQ ID NO: 447, preferably SEQ ID NO: 447, or a fragment or variant thereof. More preferably, the at least one coding RNA encodes a peptide or protein comprising IL-12 or a fragment or variant thereof as defined herein, wherein the at least one coding RNA comprises a nucleic acid sequence identical or at least 50%, 60%, 70%, 75%, 80%, 81%, 82%, 83%, 84%, 85%, 86%, 87%, 88%, 89%, 90%, 91%, 92%, 93%, 94%, 95%, 96%, 97%, 98%, 99% identical to the nucleic acid sequence according to SEQ ID NO: 21 or SEQ ID NO: 447, preferably SEQ ID NO: 447, or a fragment or variant thereof.

[0437] According to another embodiment, the at least one coding RNA encodes a peptide or protein comprising CD40L or a fragment or variant thereof as defined herein. Preferably, the encoded peptide or protein comprises an amino acid according to SEQ ID NO: 11, or a fragment or variant thereof. More preferably, the encoded peptide or protein comprises an amino acid sequence identical or at least 50%, 60%, 70%, 75%, 80%, 81%, 82%, 83%, 84%, 85%, 86%, 87%, 88%, 89%, 90%, 91%, 92%, 93%, 94%, 95%, 96%, 97%, 98%, 99% identical to the amino acid sequence according to SEQ ID NO: 11, or a fragment or variant thereof.

[0438] In a further preferred embodiment, the at least one coding RNA encodes a peptide or protein comprising CD40L or a fragment or variant thereof as defined herein, wherein the at least one coding RNA comprises a nucleic acid sequence according to SEQ ID NO: 22 or SEQ ID NO: 448, preferably SEQ ID NO: 448, or a fragment or variant thereof. More preferably, the at least one coding RNA encodes a peptide or protein comprising CD40L or a fragment or variant thereof as defined herein, wherein the at least one coding RNA comprises a nucleic acid sequence identical or at least 50%, 60%, 70%, 75%, 80%, 81%, 82%, 83%, 84%, 85%, 86%, 87%, 88%, 89%, 90%, 91%, 92%, 93%, 94%, 95%, 96%, 97%, 98%, 99% identical to the nucleic acid sequence according to SEQ ID NO: 22 or SEQ ID NO: 448, preferably SEQ ID NO: 448, or a fragment or variant of any of these sequences.

[0439] According to an alternative embodiment, the at least one coding RNA encodes a peptide or protein comprising a decoy PD-1 receptor or a fragment or variant thereof as defined herein, more preferably a soluble PD-1 receptor or a fragment or variant thereof as defined herein. Preferably, the encoded peptide or protein comprises an amino acid according to any one of SEQ ID NO: 2 or SEQ ID NO: 1042, or a fragment or variant thereof. More preferably, the encoded peptide or protein comprises an amino acid sequence identical or at least 50%, 60%, 70%, 75%, 80%, 81%, 82%, 83%, 84%, 85%, 86%, 87%, 88%, 89%, 90%, 91%, 92%, 93%, 94%, 95%, 96%, 97%, 98%, 99% identical to the amino acid sequence according to SEQ ID NO: 2 or SEQ ID NO: 1042, or a fragment or variant thereof.

[0440] In a further preferred embodiment, the at least one coding RNA encodes a peptide or protein comprising a decoy PD-1 receptor, more preferably a soluble PD-1 receptor, or a fragment or variant thereof as defined herein, wherein the at least one coding RNA comprises a nucleic acid sequence according to SEQ ID NO: 13 or SEQ ID NO: 439, preferably SEQ ID NO: 439, or a fragment or variant thereof. More preferably, the at least one coding RNA encodes a peptide or protein comprising a decoy PD-1 receptor, more preferably a soluble PD-1 receptor, or a fragment or variant thereof as defined herein, wherein the at least one coding RNA comprises a nucleic acid sequence identical or at least 50%, 60%, 70%, 75%, 80%, 81%, 82%, 83%, 84%, 85%, 86%, 87%, 88%, 89%, 90%, 91%, 92%, 93%, 94%, 95%, 96%, 97%, 98%, 99% identical to the nucleic acid sequence according to SEQ ID NO: 13 or SEQ ID NO: 439, preferably SEQ ID NO: 439, or a fragment or variant of any of these sequences.

[0441] According to an alternative embodiment, the at least one coding RNA encodes a peptide or protein comprising a decoy PD-1 receptor or a fragment or variant thereof as defined herein, more preferably a soluble PD-1 receptor or a fragment or variant thereof as defined herein. Preferably, the encoded peptide or protein comprises an amino acid according to any one of SEQ ID NO: 1, or a fragment or variant thereof. More preferably, the encoded peptide or protein comprises an amino acid sequence identical or at least 50%, 60%, 70%, 75%, 80%, 81%, 82%, 83%, 84%, 85%, 86%, 87%, 88%, 89%, 90%, 91%, 92%, 93%, 94%, 95%, 96%, 97%, 98%, 99% identical to the amino acid sequence according to SEQ ID NO: 1, or a fragment or variant thereof.

[0442] In a further preferred embodiment, the at least one coding RNA encodes a peptide or protein comprising a decoy PD-1 receptor, more preferably a soluble PD-1 receptor, or a fragment or variant thereof as defined herein, wherein the at least one coding RNA comprises a nucleic acid sequence according to SEQ ID NO: 12 or SEQ ID NO: 438, preferably SEQ ID NO: 438, or a fragment or variant thereof. More preferably, the at least one coding RNA encodes a peptide or protein comprising a decoy PD-1 receptor, more preferably a soluble PD-1 receptor, or a fragment or variant thereof as defined herein, wherein the at least one coding RNA comprises a nucleic acid sequence identical or at least 50%, 60%, 70%, 75%, 80%, 81%, 82%, 83%, 84%, 85%, 86%, 87%, 88%, 89%, 90%, 91%, 92%, 93%, 94%, 95%, 96%, 97%, 98%, 99% identical to the nucleic acid sequence according to SEQ ID NO: 12 or SEQ ID NO: 438, preferably SEQ ID NO: 438, or a fragment or variant of any of these sequences.

[0443] According to a preferred embodiment, the at least one coding RNA encodes a peptide or protein comprising a CTLA4 antagonist as described herein. Preferably, the at least one coding RNA encodes a peptide or protein comprising an anti-CTLA4 antibody as described herein, or a fragment or variant thereof as defined herein, wherein the fragment or variant is preferably a functional fragment or a functional variant. More preferably, the at least one coding RNA encodes a peptide or protein comprising an anti-CTLA4 antibody as described herein, or a fragment or variant thereof as defined herein, wherein the at least one coding RNA comprises a nucleic acid sequence according to any one of SEQ ID NO: 646-660, 662-676, 678-692, 694-705, or 707-715, preferably according to any one of SEQ ID NO: 646-660, 679-692, or 710-715, or a fragment or variant of any one of these nucleic acid sequences. Even more preferably, the at least one coding RNA encodes a peptide or protein comprising an anti-CTLA4 antibody, or a fragment or variant thereof as defined herein, wherein the at least one coding RNA comprises a nucleic acid sequence identical or at least 50%, 60%, 70%, 75%, 80%, 81%, 82%, 83%, 84%, 85%, 86%, 87%, 88%, 89%, 90%, 91%, 92%, 93%, 94%, 95%, 96%, 97%, 98%, 99% identical to the nucleic acid sequence according to SEQ ID NO: 646-660, 662-676, 678-692, 694-705, or 707-715, preferably according to any one of SEQ ID NO: 646-660, 679-692, or 710-715.

[0444] It is further preferred that the at least one coding RNA encodes a peptide or protein comprising a heavy chain of an anti-CTLA4 antibody, or a fragment or variant thereof, and a light chain of an anti-CTLA4 antibody, or a fragment or variant thereof, wherein the heavy chain and the light chain, or a fragment or variant thereof, is preferably as described herein.

[0445] Preferably, the at least one coding RNA encodes a peptide or protein comprising a heavy chain of an anti-CTLA4 antibody, or a fragment or variant thereof, and a light chain of an anti-CTLA4 antibody, or a fragment or variant thereof,

[0446] wherein the heavy chain, or the fragment or variant thereof, is encoded by a nucleic acid sequence selected from any one of SEQ ID NO: 646-660, 662-676, or 710-715, preferably from any one of SEQ ID NO: 646-660, or a fragment or variant of any one of these nucleic acid sequences, and

[0447] wherein the light chain, or the fragment or variant thereof, is encoded by a nucleic acid sequence selected from any one of SEQ ID NO: 678-692, 694-705, 707-709, or 710-715, preferably from any one of SEQ ID NO: 678-692, or a fragment or variant of any one of these nucleic acid sequences.

[0448] Therein, the heavy chain and the light chain, or the fragment or variant of any of these, respectively, is preferably encoded either by one and the same coding RNA or by different coding RNAs.

[0449] According to a preferred embodiment, the invention relates to the isRNA for use as described herein, wherein the use comprises—as an additional pharmaceutically active ingredient—an anti-CTLA4 antibody or a fragment or variant thereof as described herein, wherein the anti-CTLA4 antibody is provided in the form of two separate RNAs (formulated separately or together), wherein

[0450] the heavy chain of the anti-CTLA4 antibody, or a fragment or variant thereof, is encoded by an RNA comprising or consisting of a nucleic acid sequence selected from any one of SEQ ID NO: 646-660, 662-676, or 710-715, preferably from any one of SEQ ID NO: 646-660, or a fragment or variant of any one of these nucleic acid sequences, and

[0451] wherein the light chain of the anti-CTLA4 antibody, or a fragment or variant thereof, is encoded by another RNA comprising or consisting of a nucleic acid sequence selected from any one of SEQ ID NO: 678-692, 694-705, 707-709, or 710-715, preferably from any one of SEQ ID NO: 678-692, or a fragment or variant of any one of these nucleic acid sequences.

[0452] In an alternative embodiment, the invention relates to the isRNA for use as described herein, wherein the use comprises—as an additional pharmaceutically active ingredient—an anti-CTLA4 antibody or a fragment or variant thereof as described herein, wherein the anti-CTLA4 antibody, or the fragment or variant thereof, is provided in the form of an RNA, wherein one RNA encodes both, the heavy chain of the anti-CTLA4 antibody, or a fragment or variant thereof, and the light chain of the anti-CTLA4 antibody, or a fragment or variant thereof, and wherein the RNA preferably comprises or consists of a nucleic acid sequence according to any one of SEQ ID NO: 710-712, 713-715, or a fragment or variant of any one of these nucleic acid sequences.

[0453] The present invention further provides the isRNA for use in the treatment of a tumor or cancer disease as described herein, wherein the treatment comprises administration of at least one coding RNA (as additional pharmaceutically active ingredient), preferably at least one mRNA, wherein the at least one coding RNA encodes at least two peptides or proteins selected from the group consisting of
[0454] IL-12,
[0455] CD40L,
[0456] an anti-CTLA4 antibody, and
[0457] optionally, a decoy PD-1 receptor, preferably a soluble PD-1 receptor,

[0458] or a fragment or variant of any of these, and

[0459] wherein the IL-12, the CD40L, the decoy PD-1 receptor, or the anti-CTLA4 antibody, or a fragment or variant of any of these, is preferably as described herein.

[0460] In the context of the present invention, an anti-CTLA4 antibody as used herein may be referred to as ‘(one) peptide or protein’ (in the singular) even though the (mature) anti-CTLA4 antibody, or the fragment or variant thereof, preferably comprises at least two peptides or proteins, namely a heavy chain, or a fragment or variant thereof, and a light chain, or a fragment or variant thereof.

[0461] In certain embodiments, the treatment of a tumor or cancer disease thus comprises the administration of at least one coding RNA (as additional pharmaceutically active ingredient), preferably at least two, three, four or five coding RNAs, encoding at least two, preferably two, three or four, of the peptides or proteins, or a fragment or variant of any of these, preferably resulting in the expression of said at least two peptides or proteins, or a fragment or variant of any of these, upon administration of the at least one coding RNA to a subject.

[0462] According to a particularly preferred embodiment, the treatment of a tumor or cancer disease comprises administration of at least two or three coding RNAs (as additional pharmaceutically active ingredients), wherein each of the coding RNAs encodes a different one of a peptide or protein selected from the group consisting of
[0463] IL-12,
[0464] CD40L,
[0465] an anti-CTLA4 antibody, and
[0466] optionally, a decoy PD-1 receptor, preferably a soluble PD-1 receptor,

[0467] or a fragment or variant of any of these, and

[0468] wherein the IL-12, the CD40L, the decoy PD-1 receptor, or the anti-CTLA4 antibody, or a fragment or variant of any of these, is preferably as described herein.

[0469] In another embodiment, the treatment of a tumor or cancer disease comprises administration at least one coding RNA (as additional pharmaceutically active ingredient(s)), wherein the at least one coding RNA is a bi- or multicistronic RNA encoding at least one peptide or protein, preferably two, three or four peptides or proteins, selected from the group consisting of
[0470] IL-12,
[0471] CD40L,
[0472] an anti-CTLA4 antibody, and
[0473] optionally, a decoy PD-1 receptor, preferably a soluble PD-1 receptor,

[0474] or a fragment or variant of any of these, and

[0475] wherein the IL-12, the CD40L, the decoy PD-1 receptor, or the anti-CTLA4 antibody, or a fragment or variant of any of these, is preferably as described herein.

[0476] In this context, it was surprisingly found by the inventors that the expression of the combinations of two, preferably three or four, of the peptides or proteins defined herein is particularly beneficial in the treatment of a tumor or cancer disease, in particular when combined with the isRNA as described herein.

[0477] According to a preferred embodiment, the present invention provides the isRNA for use in the treatment of a tumor or cancer disease as described herein, wherein the treatment comprises administration of at least one coding RNA (as additional pharmaceutically active ingredient), preferably at least one mRNA, wherein

[0478] the at least one coding RNA comprises at least one coding sequence encoding a peptide or protein comprising CD40L or a fragment or variant thereof, and

[0479] the same or a different coding RNA comprises at least one coding sequence encoding a peptide or protein comprising IL 12 or a fragment or variant thereof.

[0480] In a further preferred embodiment, the present invention provides the isRNA for use in the treatment of a tumor or cancer disease as described herein, wherein the treatment comprises administration of at least one coding RNA (as additional pharmaceutically active ingredient), preferably at least one mRNA, wherein

[0481] the at least one coding RNA comprises at least one coding sequence encoding a peptide or protein comprising CD40L or a fragment or variant thereof, and

[0482] the same or a different coding RNA comprises at least one coding sequence encoding a peptide or protein comprising a decoy PD-1 receptor, preferably a soluble PD-1 receptor, or a fragment or variant thereof.

[0483] According to another embodiment, the present invention provides the isRNA for use in the treatment of a tumor or cancer disease as described herein, wherein the treatment comprises administration of at least one coding RNA (as additional pharmaceutically active ingredient), preferably at least one mRNA, wherein

[0484] the at least one coding RNA comprises at least one coding sequence encoding a peptide or protein comprising IL 12 or a fragment or variant thereof, and

[0485] the same or a different coding RNA comprises at least one coding sequence encoding a peptide or protein comprising a decoy PD 1 receptor, preferably a soluble PD-1 receptor, or a fragment or variant thereof.

[0486] According to a preferred embodiment, the present invention provides the isRNA for use in the treatment of a tumor or cancer disease as described herein, wherein the treatment comprises administration of at least one coding RNA (as additional pharmaceutically active ingredient), preferably at least one mRNA, wherein

[0487] the at least one coding RNA comprises at least one coding sequence encoding a peptide or protein comprising IL12 or a fragment or variant thereof, and

[0488] the same or a different coding RNA comprises at least one coding sequence encoding a peptide or protein comprising an anti-CTLA4 antibody or a fragment or variant thereof.

[0489] According to a preferred embodiment, the present invention provides the isRNA for use in the treatment of a tumor or cancer disease as described herein, wherein the treatment comprises administration of at least one coding RNA (as additional pharmaceutically active ingredient), preferably at least one mRNA, wherein

[0490] the at least one coding RNA comprises at least one coding sequence encoding a peptide or protein comprising CD40L or a fragment or variant thereof, and

[0491] the same or a different coding RNA comprises at least one coding sequence encoding a peptide or protein comprising an anti-CTLA4 antibody or a fragment or variant thereof.

[0492] According to a preferred embodiment, the present invention provides the isRNA for use in the treatment of a tumor or cancer disease as described herein, wherein the treatment comprises administration of at least one coding RNA (as additional pharmaceutically active ingredient), preferably at least one mRNA, wherein

[0493] the at least one coding RNA comprises at least one coding sequence encoding a peptide or protein comprising a decoy PD 1 receptor, preferably a soluble PD-1 receptor, or a fragment or variant thereof, and

[0494] the same or a different coding RNA comprises at least one coding sequence encoding a peptide or protein comprising an anti-CTLA4 antibody or a fragment or variant thereof.

[0495] In a particularly preferred embodiment, the present invention provides the isRNA for use in the treatment of a tumor or cancer disease as described herein, wherein the treatment comprises administration of at least one coding RNA (as additional pharmaceutically active ingredient), preferably at least one mRNA, wherein

[0496] the at least one coding RNA comprises at least one coding sequence encoding a peptide or protein comprising IL-12 or a fragment or variant thereof,

[0497] the same or a different coding RNA comprises at least one coding sequence encoding a peptide or protein comprising a decoy PD 1 receptor, preferably a soluble PD-1 receptor, or a fragment or variant thereof, and the same or a different coding RNA comprises at least one coding sequence encoding a peptide or protein comprising CD40L or a fragment or variant thereof.

[0498] In that embodiment, the coding sequence encoding a peptide or protein comprising IL-12 or a fragment or variant thereof, the coding sequence encoding a peptide or protein comprising a decoy PD 1 receptor, preferably a soluble PD-1 receptor, or a fragment or variant thereof, and the coding sequence encoding a peptide or protein comprising CD40L or a fragment or variant thereof may preferably be located on a separate coding RNA, preferably a separate mRNA. Alternatively, at least two of the coding sequences encoding a peptide or protein comprising IL-12 or a fragment or variant thereof, encoding a peptide or protein comprising a decoy PD 1 receptor, preferably a soluble PD-1 receptor, or a fragment or variant thereof, and encoding a peptide or protein comprising CD40L or a fragment or variant thereof, are located on the same coding RNA, which is preferably a bi- or multicistronic RNA.

[0499] According to certain preferred embodiments, the present invention provides the isRNA for use in the treatment of a tumor or cancer disease as described herein, wherein the treatment comprises administration of at least one coding RNA (as additional pharmaceutically active ingredient), preferably at least one mRNA, wherein

[0500] the at least one coding RNA comprises at least one coding sequence encoding a peptide or protein comprising or consisting of IL-12 or a fragment or variant thereof,

[0501] the same or a different coding RNA comprises at least one coding sequence encoding a peptide or protein comprising or consisting of CD40L or a fragment or variant thereof, and

[0502] the same or a different coding RNA comprises at least one coding sequence encoding a peptide or protein comprising or consisting of an anti-CTLA4 antibody, preferably as described herein, or a fragment or variant thereof.

[0503] This embodiment is particularly preferred if the patient receives or has received a treatment with a PD-1 antagonist or a PD-L1 antagonist, such as an anti-PD-1 or anti-PD-L1 antibody.

[0504] According to certain preferred embodiments, the present invention provides the isRNA for use in the treatment of a tumor or cancer disease as described herein, wherein the treatment comprises administration of at least one coding RNA (as additional pharmaceutically active ingredient), preferably at least one mRNA, wherein

[0505] the at least one coding RNA comprises at least one coding sequence encoding a peptide or protein comprising or consisting of IL-12 or a fragment or variant thereof,

[0506] the same or a different coding RNA comprises at least one coding sequence encoding a peptide or protein comprising or consisting of a decoy PD 1 receptor, preferably a soluble PD-1 receptor, or a fragment or variant thereof,

[0507] the same or a different coding RNA comprises at least one coding sequence encoding a peptide or protein comprising or consisting of CD40L or a fragment or variant thereof, and

[0508] the same or a different coding RNA comprises at least one coding sequence encoding a peptide or protein comprising or consisting of an anti-CTLA4 antibody, preferably as described herein, or a fragment or variant thereof.

[0509] This embodiment is particularly preferred if the patient does not receive or has not received a treatment with a PD-1 antagonist or a PD-L1 antagonist, such as an anti PD-1 or anti-PD-L1 antibody.

[0510] In these embodiments, the coding sequence encoding a peptide or protein comprising or consisting of IL-12 or a fragment or variant thereof, optionally the coding sequence encoding a peptide or protein comprising or consisting of a decoy PD 1 receptor, preferably a soluble PD-1 receptor, or a fragment or variant thereof, the coding sequence encoding a peptide or protein comprising or consisting of CD40L or a fragment or variant thereof, and the coding sequence encoding a peptide or protein comprising or consisting of an anti-CTLA4 antibody or a fragment or variant thereof, may preferably be located on a separate coding RNA, preferably a separate mRNA. Alternatively, at least two of the coding sequences encoding a peptide or protein comprising or consisting of IL-12 or a fragment or variant thereof, the coding sequence encoding a peptide or protein comprising or consisting of a decoy PD 1 receptor, preferably a soluble PD-1 receptor, or a fragment or variant thereof, the coding sequence encoding a peptide or protein comprising or consisting of CD40L or a fragment or variant thereof, and the coding sequence encoding a peptide or protein comprising or consisting of an anti-CTLA4 antibody or a fragment or variant thereof, are located on the same coding RNA, which is preferably a bi- or multicistronic RNA.

[0511] In some embodiments, the present invention provides the isRNA for use in the treatment of a tumor or cancer disease as described herein, wherein the treatment comprises administration of at least one coding RNA (as additional pharmaceutically active ingredient), preferably at least one mRNA, wherein

[0512] the at least one coding RNA comprises at least one coding sequence encoding a peptide or protein comprising or consisting of IL-12 or a fragment or variant thereof,

[0513] the same or a different coding RNA comprises at least one coding sequence encoding a peptide or protein comprising or consisting of CD40L or a fragment or variant thereof, and

[0514] the same or a different coding RNA comprises at least one coding sequence encoding a peptide or protein comprising or consisting of an anti-CTLA4 antibody, preferably as described herein, or a fragment or variant thereof.

[0515] In these embodiments, the coding sequence encoding a peptide or protein comprising or consisting of IL-12 or a fragment or variant thereof, the coding sequence encoding a peptide or protein comprising or consisting of CD40L or a fragment or variant thereof, and the coding sequence encoding a peptide or protein comprising or consisting of an anti-CTLA4 antibody or a fragment or variant thereof, may preferably be located on a separate coding RNA, preferably a separate mRNA. Alternatively, at least two of the coding sequences encoding a peptide or protein comprising or consisting of IL-12 or a fragment or variant thereof, the coding sequence encoding a peptide or protein comprising or consisting of CD40L or a fragment or variant thereof, and the coding sequence encoding a peptide or protein comprising or consisting of an anti-CTLA4 antibody or a fragment or variant thereof, are located on the same coding RNA, which is preferably a bi- or multicistronic RNA.

[0516] In a preferred embodiment, the present invention provides the isRNA for use in the treatment of a tumor or cancer disease as described herein, wherein the treatment comprises administration of at least one coding RNA (as additional pharmaceutically active ingredient), preferably at least one mRNA, wherein the at least one coding sequence encodes at least one tumor antigen or a fragment or variant thereof. Preferably the coding sequence comprises at least one nucleic acid sequence preferably selected from the group consisting of SEQ ID Nos. 505-4033; 4561-4591 of PCT/EP2017/059525, or a fragment or variant of any one of said sequences

[0517] In a preferred embodiment, the present invention provides the isRNA for use in the treatment of a tumor or cancer disease as described herein, wherein the treatment comprises administration of at least one coding RNA (as additional pharmaceutically active ingredient), preferably at least one mRNA, wherein the at least one coding sequence comprises
[0518] a) a nucleic acid sequence selected from the group consisting of SEQ ID NO: 14 to 19 or SEQ ID NOs: 440 to 445 or 447, preferably from the group consisting of SEQ ID NOs: 440 to 445 or 447, or a fragment or variant of any of these sequences, preferably a nucleic acid sequence according to SEQ ID NO: 21 or SEQ ID NO: 447, preferably SEQ ID NO: 447, or a fragment or variant of any of these sequences;
[0519] b) a nucleic acid sequence according to SEQ ID NO: 22 or SEQ ID NO: 448, preferably SEQ ID NO: 448, or a fragment or variant thereof,
[0520] c) a nucleic acid sequence according to any one of SEQ ID NO: 646-660 or 662-676, preferably according to any one of SEQ ID NO: 646-660, or a fragment or variant of any one of these nucleic acid sequences, and a nucleic acid sequence according to any one of SEQ ID NO: 678-692, 694-705 or 707-709, preferably according to any one of SEQ ID NO: 678-692, or a fragment or variant of any of these nucleic acid sequences; or
   [0521] a nucleic acid sequence according to any one of SEQ ID NO: 710-712 or 713-715, or a fragment or variant of any of these nucleic acid sequences, and/or
[0522] d) optionally, a nucleic acid sequence according to SEQ ID NO: 13 or SEQ ID NO: 439, preferably SEQ ID NO: 439, or a fragment or variant thereof.

[0523] According to one embodiment, the at least one coding RNA or the isRNA as described herein may be in the form of a modified RNA, wherein any modification as defined herein, may be introduced into the at least one coding RNA or into the isRNA as described herein. According to a preferred embodiment, the at least one coding RNA as described herein comprises at least one coding sequence comprising a nucleic acid sequence that is modified compared to the nucleic acid sequence of the coding sequence of the corresponding wild type RNA, and wherein the amino acid sequence encoded by said coding sequence is preferably not modified compared to the amino acid sequence encoded by the coding sequence of the corresponding wild type RNA. Modifications as defined herein preferably lead to a stabilization of the at least one coding RNA as used herein.

[0524] In a further preferred embodiment, the present invention thus provides the isRNA for use in the treatment of a tumor or cancer disease as described herein, wherein the treatment comprises administration of at least one coding RNA (as additional pharmaceutically active ingredient), preferably at least one mRNA, wherein the at least one coding sequence comprises
[0525] a) a nucleic acid sequence selected from the group consisting of SEQ ID NOs: 14-19; 440-445; 447; 25-30; 36-41; 47-52; 58-63; 69-74; 80-85; 91-96; 102-107; 113-118; 124-129; 135-140; 601-606; 612-617; 623-628; 716-725; 727; 1018-1021 and 1059-1062, or a fragment or variant of any of these sequences, preferably from the group consisting of SEQ ID NOs: 21; 447; 32; 43; 54; 65; 76; 87; 98; 109; 120; 131; 142; 608; 619; 630; 632-644; 726 and 1058, or a fragment or variant of any of these sequences;
[0526] b) a nucleic acid sequence selected from the group consisting of SEQ ID NOs: 22; 448; 33; 44; 55; 66; 77; 88; 99; 110; 121; 132; 143; 609; 620; 631; 728-738 and 1025-1028, or a fragment or variant of any of these sequences;
[0527] c) a nucleic acid sequence according to any one of SEQ ID NO: 646-660; 662-676 or 1029-1036, preferably according to any one of SEQ ID NO: 646-660, or a fragment or variant of any one of these nucleic acid sequences, and a nucleic acid sequence according to any one of SEQ ID NO: 678-692, 694-705; 707-709 or 1037-1041, preferably according to any one of SEQ ID NO: 678-692, or a fragment or variant of any of these nucleic acid sequences;
   [0528] or
   [0529] a nucleic acid sequence according to any one of SEQ ID NO: 710-712 or 713-715, or a fragment or variant of any of these nucleic acid sequences, and/or
[0530] d) optionally, a nucleic acid sequence selected from the group consisting of SEQ ID NOs: 12; 438; 23; 34; 45; 56; 67; 78; 89; 100; 111; 122; 133; 599; 610; 621 and 1022-1024, or a fragment or variant of any of these sequences, preferably from the group consisting of SEQ ID NOs: 13, 439; 24; 439; 35; 46; 57; 68; 79; 90; 101; 112; 123; 134; 600; 611; 622 and 1043-1054, or a fragment or variant of any of these sequences.

[0531] In a preferred embodiment, the present invention thus provides the isRNA for use in the treatment of a tumor or cancer disease as described herein, wherein the treatment comprises administration of at least one coding RNA (as additional pharmaceutically active ingredient), preferably at least one mRNA, wherein the at least one coding sequence comprises
[0532] a) a nucleic acid sequence selected from the group consisting of SEQ ID NOs: 25-30; 36-41; 47-52; 58-63; 69-74; 80-85; 91-96; 102-107; 113-118; 124-129; 135-140; 601-606; 612-617; 623-628; 716-725; 727; 1018-1021 and 1059-1062, or a fragment or variant of any of these sequences, preferably from the group consisting of SEQ ID NOs: 32; 43; 54; 65; 76; 87; 98; 109; 120; 131; 142; 608; 619; 630; 632-644; 726 and 1058, or a fragment or variant of any of these sequences;
[0533] b) a nucleic acid sequence selected from the group consisting of SEQ ID NOs: 33; 44; 55; 66; 77; 88; 99; 110; 121; 132; 143; 609; 620; 631; 728-738; 1025-1028 and 1025-1028, or a fragment or variant of any of these sequences;
[0534] c) a nucleic acid sequence according to any one of SEQ ID NO: 646-660; 662-676 or 1029-1036, preferably according to any one of SEQ ID NO: 646-660, or a fragment or variant of any one of these nucleic acid sequences, and a nucleic acid sequence according to any one of SEQ ID NO: 678-692, 694-705; 707-709 or 1037-1041, preferably according to any one of SEQ ID NO: 678-692, or a fragment or variant of any of these nucleic acid sequences;
   [0535] or
   [0536] a nucleic acid sequence according to any one of SEQ ID NO: 710-712 or 713-715, or a fragment or variant of any of these nucleic acid sequences, and/or
[0537] d) optionally, a nucleic acid sequence selected from the group consisting of SEQ ID NOs: 23; 34; 45; 56; 67; 78; 89; 100; 111; 122; 133; 599; 610; 621; 1022-1024, or a fragment or variant of any of these sequences, preferably from the group consisting of SEQ ID NOs: 24; 35; 46; 57; 68; 79; 90; 101; 112; 123; 134; 600; 611; 622 and 1043-1054, or a fragment or variant of any of these sequences.

[0538] In this context, a coding RNA as used herein comprising at least one coding sequence that comprises a (wild type or modified) nucleic acid sequence encoding IL-12 or a fragment or variant thereof as described herein, may preferably comprise a nucleic acid sequence according to any of SEQ ID NOs: 20; 31; 42; 53; 64; 75; 86; 97; 108; 119; 130; 141; 446; 607; 618 or 629, or a fragment or variant of any of these sequences.

[0539] According to one embodiment, the at least one coding RNA as described herein may thus be provided as a “stabilized RNA”, that is to say as an RNA that is essentially resistant to in vivo degradation (e.g. by an exo- or endo-nuclease). Such stabilization can be effected, for example, by a modified phosphate backbone of the at least one coding RNA as used herein. A backbone modification in connection with the present invention is a modification in which phosphates of the backbone of the nucleotides contained in the RNA are chemically modified. Nucleotides that may be preferably used in this connection contain e.g. a phosphorothioate-modified phosphate backbone, preferably at least one of the phosphate oxygens contained in the phosphate backbone being replaced by a sulfur atom. Stabilized RNAs may further include, for example: non-ionic phosphate analogues, such as, for example, alkyl and aryl phosphonates, in which the charged phosphonate oxygen is replaced by an alkyl or aryl group, or phosphodiesters and alkylphosphotriesters, in which the charged oxygen residue is present in alkylated form. Such backbone modifications typically include, without implying any limitation, modifications from the group consisting of methylphosphonates, phosphoramidates and phosphorothioates (e.g. cytidine-5′-O-(1-thiophosphate)).

[0540] In the following, specific modifications are described, which are preferably capable of “stabilizing” the at least one coding RNA as defined herein.

[0541] Chemical Modifications:

[0542] The term “RNA modification” as used herein may refer to chemical modifications comprising backbone modifications as well as sugar modifications or base modifications.

[0543] In this context, a modified RNA as defined herein may contain nucleotide analogues/modifications, e.g. backbone modifications, sugar modifications or base modifications. A backbone modification in connection with the present invention is a modification, in which phosphates of the backbone of the nucleotides contained in an RNA as defined herein are chemically modified. A sugar modification in connection with the present invention is a chemical modification of the sugar of the nucleotides of the RNA as defined herein. Furthermore, a base modification in connection with the present invention is a chemical modification of the base moiety of the nucleotides of the RNA. In this context, nucleotide analogues or modifications are preferably selected from nucleotide analogues, which are applicable for transcription and/or translation.

[0544] Sugar Modifications:

[0545] The modified nucleosides and nucleotides, which may be incorporated into a modified RNA as described herein, can be modified in the sugar moiety. For example, the 2′ hydroxyl group (OH) can be modified or replaced with a number of different “oxy” or “deoxy” substituents. Examples of “oxy”−2′ hydroxyl group modifications include, but are not limited to, alkoxy or aryloxy (—OR, e.g., R═H, alkyl, cycloalkyl, aryl, aralkyl, heteroaryl or sugar); polyethyleneglycols (PEG), —O(CH₂CH₂O)nCH₂CH₂OR; “locked” nucleic acids (LNA) in which the 2′ hydroxyl is connected, e.g., by a methylene bridge, to the 4′ carbon of the same ribose sugar; and amino groups (—O-amino, wherein the amino group, e.g., NRR, can be alkylamino, dialkylamino, heterocyclyl, arylamino, diarylamino, heteroarylamino, or diheteroaryl amino, ethylene diamine, polyamino) or aminoalkoxy.

[0546] “Deoxy” modifications include hydrogen, amino (e.g. NH₂; alkylamino, dialkylamino, heterocyclyl, arylamino, diaryl amino, heteroaryl amino, diheteroaryl amino, or amino acid); or the amino group can be attached to the sugar through a linker, wherein the linker comprises one or more of the atoms C, N, and O.

[0547] The sugar group can also contain one or more carbons that possess the opposite stereochemical configuration than that of the corresponding carbon in ribose. Thus, a modified RNA can include nucleotides containing, for instance, arabinose as the sugar.

[0548] Backbone Modifications:

[0549] The phosphate backbone may further be modified in the modified nucleosides and nucleotides, which may be incorporated into a modified RNA as described herein. The phosphate groups of the backbone can be modified by replacing one or more of the oxygen atoms with a different substituent. Further, the modified nucleosides and nucleotides can include the full replacement of an unmodified phosphate moiety with a modified phosphate as described herein. Examples of modified phosphate groups include, but are not limited to, phosphorothioate, phosphoroselenates, borano phosphates, borano phosphate esters, hydrogen phosphonates, phosphoroamidates, alkyl or aryl phosphonates and phosphotriesters. Phosphorodithioates have both non-linking oxygens replaced by sulfur. The phosphate linker can also be modified by the replacement of a linking oxygen with nitrogen (bridged phosphoroamidates), sulfur (bridged phosphorothioates) and carbon (bridged methylene-phosphonates).

[0550] Base Modifications:

[0551] The modified nucleosides and nucleotides, which may be incorporated into a modified RNA as described herein can further be modified in the nucleobase moiety. Examples of nucleobases found in RNA include, but are not limited to, adenine, guanine, cytosine and uracil. For example, the nucleosides and nucleotides described herein can be chemically modified on the major groove face. In some embodiments, the major groove chemical modifications can include an amino group, a thiol group, an alkyl group, or a halo group.

[0552] In particularly preferred embodiments of the present invention, the nucleotide analogues/modifications are selected from base modifications, which are preferably selected from 2-amino-6-chloropurineriboside-5′-triphosphate, 2-Aminopurine-riboside-5′-triphosphate; 2-aminoadenosine-5′-triphosphate, 2′-Amino-2′-deoxycytidine-triphosphate, 2-thiocytidine-5′-triphosphate, 2-thiouridine-5′-triphosphate, 2′-Fluorothymidine-5′-triphosphate, 2′-O-Methyl inosine-5′-triphosphate 4-thiouridine-5′-triphosphate, 5-aminoallylcytidine-5′-triphosphate, 5-aminoallyluridine-5′-triphosphate, 5-bromocytidine-5′-triphosphate, 5-bromouridine-5′-triphosphate, 5-Bromo-2′-deoxycytidine-5′-triphosphate, 5-Bromo-2′-deoxyuridine-5′-triphosphate, 5-iodocytidine-5′-triphosphate, 5-Iodo-2′-deoxycytidine-5′-triphosphate, 5-iodouridine-5′-triphosphate, 5-Iodo-2′-deoxyuridine-5′-triphosphate, 5-methylcytidine-5′-triphosphate, 5-methyluridine-5′-triphosphate, 5-Propynyl-2′-deoxycytidine-5′-triphosphate, 5-Propynyl-2′-deoxyuridine-5′-triphosphate, 6-azacytidine-5′-triphosphate, 6-azauridine-5′-triphosphate, 6-chloropurineriboside-5′-triphosphate, 7-deazaadenosine-5′-triphosphate, 7-deazaguanosine-5′-triphosphate, 8-azaadenosine-5′-triphosphate, 8-azidoadenosine-5′-triphosphate, benzimidazole-riboside-5′-triphosphate, N1-methyladenosine-5′-triphosphate, N1-methylguanosine-5′-triphosphate, N6-methyladenosine-5′-triphosphate, 06-methylguanosine-5′-triphosphate, pseudouridine-5′-triphosphate, or puromycin-5′-triphosphate, xanthosine-5′-triphosphate. Particular preference is given to nucleotides for base modifications selected from the group of base-modified nucleotides consisting of 5-methylcytidine-5′-triphosphate, 7-deazaguanosine-5′-triphosphate, 5-bromocytidine-5′-triphosphate, and pseudouridine-5′-triphosphate.

[0553] In some embodiments, modified nucleosides include pyridin-4-one ribonucleoside, 5-aza-uridine, 2-thio-5-aza-uridine, 2-thiouridine, 4-thio-pseudouridine, 2-thio-pseudouridine, 5-hydroxyuridine, 3-methyluridine, 5-carboxymethyl-uridine, 1-carboxymethyl-pseudouridine, 5-propynyl-uridine, 1-propynyl-pseudouridine, 5-taurinomethyluridine, 1-taurinomethyl-pseudouridine, 5-taurinomethyl-2-thio-uridine, 1-taurinomethyl-4-thio-uridine, 5-methyl-uridine, 1-methyl-pseudouridine, 4-thio-1-methyl-pseudouridine, 2-thio-1-methyl-pseudouridine, 1-methyl-1-deaza-pseudouridine, 2-thio-1-methyl-1-deaza-pseudouridine, dihydrouridine, dihydropseudouridine, 2-thio-dihydrouridine, 2-thio-dihydropseudouridine, 2-methoxyuridine, 2-methoxy-4-thio-uridine, 4-methoxy-pseudouridine, and 4-methoxy-2-thio-pseudouridine.

[0554] In some embodiments, modified nucleosides include 5-aza-cytidine, pseudoisocytidine, 3-methylcytidine, N4-acetylcytidine, 5-formylcytidine, N4-methylcytidine, 5-hydroxymethylcytidine, 1-methyl-pseudoisocytidine, pyrrolo-cytidine, pyrrolo-pseudoisocytidine, 2-thio-cytidine, 2-thio-5-methyl-cytidine, 4-thio-pseudoisocytidine, 4-thio-1-methyl-pseudoisocytidine, 4-thio-1-methyl-1-deaza-pseudoisocytidine, 1-methyl-1-deaza-pseudoisocytidine, zebularine, 5-aza-zebularine, 5-methyl-zebularine, 5-aza-2-thio-zebularine, 2-thio-zebularine, 2-methoxy-cytidine, 2-methoxy-5-methyl-cytidine, 4-methoxy-pseudoisocytidine, and 4-methoxy-1-methyl-pseudoisocytidine.

[0555] In other embodiments, modified nucleosides include 2-aminopurine, 2, 6-diaminopurine, 7-deaza-adenine, 7-deaza-8-aza-adenine, 7-deaza-2-aminopurine, 7-deaza-8-aza-2-aminopurine, 7-deaza-2,6-diaminopurine, 7-deaza-8-aza-2,6-diaminopurine, 1-methyladenosine, N6-methyladenosine, N6-isopentenyladenosine, N6-(cis-hydroxyisopentenyl)adenosine, 2-methylthio-N6-(cis-hydroxyisopentenyl) adenosine, N6-glycinylcarbamoyladenosine, N6-threonylcarbamoyladenosine, 2-methylthio-N6-threonyl carbamoyladenosine, N6,N6-dimethyladenosine, 7-methyladenine, 2-methylthio-adenine, and 2-methoxy-adenine.

[0556] In other embodiments, modified nucleosides include inosine, 1-methyl-inosine, wyosine, wybutosine, 7-deaza-guanosine, 7-deaza-8-aza-guanosine, 6-thio-guanosine, 6-thio-7-deaza-guanosine, 6-thio-7-deaza-8-aza-guanosine, 7-methyl-guanosine, 6-thio-7-methyl-guanosine, 7-methylinosine, 6-methoxy-guanosine, 1-methylguanosine, N2-methylguanosine, N2,N2-dimethylguanosine, 8-oxo-guanosine, 7-methyl-8-oxo-guanosine, 1-methyl-6-thio-guanosine, N2-methyl-6-thio-guanosine, and N2,N2-dimethyl-6-thio-guanosine.

[0557] In some embodiments, the nucleotide can be modified on the major groove face and can include replacing hydrogen on C-5 of uracil with a methyl group or a halo group.

[0558] In specific embodiments, a modified nucleoside is 5′-O-(1-thiophosphate)-adenosine, 5′-O-(1-thiophosphate)-cytidine, 5′-O-(1-thiophosphate)-guanosine, 5′-O-(1-thiophosphate)-uridine or 5′-O-(1-thiophosphate)-pseudouridine.

[0559] In further specific embodiments, a modified RNA as described herein may comprise nucleoside modifications selected from 6-aza-cytidine, 2-thio-cytidine, α-thio-cytidine, Pseudo-iso-cytidine, 5-aminoallyl-uridine, 5-iodo-uridine, N1-methyl-pseudouridine, 5,6-dihydrouridine, α-thio-uridine, 4-thio-uridine, 6-aza-uridine, 5-hydroxy-uridine, deoxy-thymidine, 5-methyl-uridine, Pyrrolo-cytidine, inosine, α-thio-guanosine, 6-methyl-guanosine, 5-methyl-cytdine, 8-oxo-guanosine, 7-deaza-guanosine, N1-methyl-adenosine, 2-amino-6-Chloro-purine, N6-methyl-2-amino-purine, Pseudo-iso-cytidine, 6-Chloro-purine, N6-methyl-adenosine, α-thio-adenosine, 8-azido-adenosine, 7-deaza-adenosine.

[0560] Lipid Modification:

[0561] According to a further embodiment, a modified RNA as defined herein can contain a lipid modification. Such a lipid-modified RNA typically comprises an RNA as defined herein, preferably a coding RNA as described herein. Such a lipid-modified RNA as defined herein typically further comprises at least one linker covalently linked with that RNA, and at least one lipid covalently linked with the respective linker. Alternatively, the lipid-modified RNA comprises at least one RNA as defined herein, preferably a coding RNA as described herein, and at least one (bifunctional) lipid covalently linked (without a linker) with that RNA. According to a third alternative, the lipid-modified RNA comprises an RNA molecule as defined herein, preferably a coding RNA as described herein, at least one linker covalently linked with that RNA, and at least one lipid covalently linked with the respective linker, and also at least one (bifunctional) lipid covalently linked (without a linker) with that RNA. In this context, it is particularly preferred that the lipid modification is present at the terminal ends of a linear RNA sequence.

[0562] G/C Content Optimization:

[0563] According to an especially preferred embodiment of the invention, the at least one coding RNA as described herein is modified. Preferably the RNA is stabilized by modifying and preferably increasing the G (guanosine)/C (cytosine) content of at least one coding region thereof. Therein, the G/C content of the RNA of the coding region is increased compared to the G/C content of the coding region of its particular wild type coding sequence, i.e. the corresponding unmodified RNA. However, the encoded amino acid sequence of the RNA is preferably not modified compared to the encoded amino acid sequence of the particular wild type/unmodified RNA.

[0564] The modification of the G/C-content of the at least one coding RNA as described herein is based on the fact that RNA sequences having an increased G (guanosine)/C (cytosine) content are typically more stable than RNA sequences having an increased A (adenosine)/U (uracil) content. The codons of a coding sequence or a whole RNA might therefore be varied compared to the wild type coding sequence or RNA, such that they include an increased amount of G/C nucleotides, while the translated amino acid sequence is preferably retained. In respect to the fact that several codons code for one and the same amino acid (so-called degeneration of the genetic code), the most favourable codons for the stability can be determined (so-called alternative codon usage). Depending on the amino acid to be encoded by the at least one RNA, there are various possibilities for modification of the RNA sequence, compared to its wild type sequence. In the case of amino acids which are encoded by codons, which contain exclusively G or C nucleotides, no modification of the codon is necessary. Thus, the codons for Pro (CCC or CCG), Arg (CGC or CGG), Ala (GCC or GCG) and Gly (GGC or GGG) require no modification, since no A or U is present. In contrast, codons which contain A and/or U nucleotides can be modified by substitution of other codons, which code for the same amino acids but contain no A and/or U. Examples of these are: the codons for Pro can be modified from CCU or CCA to CCC or CCG; the codons for Arg can be modified from CGU or CGA or AGA or AGG to CGC or CGG; the codons for Ala can be modified from GCU or GCA to GCC or GCG; the codons for Gly can be modified from GGU or GGA to GGC or GGG. In other cases, although A or U nucleotides cannot be eliminated from the codons, it is however possible to decrease the A and U content by using codons which contain a lower content of A and/or U nucleotides. Examples of these are: the codons for Phe can be modified from UUU to UUC; the codons for Leu can be modified from UUA, UUG, CUU or CUA to CUC or CUG; the codons for Ser can be modified from UCU or UCA or AGU to UCC, UCG or AGC; the codon for Tyr can be modified from UAU to UAC; the codon for Cys can be modified from UGU to UGC; the codon for His can be modified from CAU to CAC; the codon for Gln can be modified from CAA to CAG; the codons for Ile can be modified from AUU or AUA to AUC; the codons for Thr can be modified from ACU or ACA to ACC or ACG; the codon for Asn can be modified from MU to MC; the codon for Lys can be modified from MA to AAG; the codons for Val can be modified from GUU or GUA to GUC or GUG; the codon for Asp can be modified from GAU to GAC; the codon for Glu can be modified from GM to GAG; the stop codon UAA can be modified to UAG or UGA. In the case of the codons for Met (AUG) and Trp (UGG), on the other hand, there is no possibility of sequence modification. The substitutions listed above can be used either individually or in all possible combinations to increase the G/C content of the at least one mRNA of the composition of the present invention compared to its particular wild type mRNA (i.e. the original sequence). Thus, for example, all codons for Thr occurring in the wild type sequence can be modified to ACC (or ACG). Preferably, however, for example, combinations of the above substitution possibilities are used:
[0565] substitution of all codons coding for Thr in the original sequence (wild type mRNA) to ACC (or ACG) and
[0566] substitution of all codons originally coding for Ser to UCC (or UCG or AGC); substitution of all codons coding for Ile in the original sequence to AUC and
[0567] substitution of all codons originally coding for Lys to AAG and
[0568] substitution of all codons originally coding for Tyr to UAC; substitution of all codons coding for Val in the original sequence to GUC (or GUG) and
[0569] substitution of all codons originally coding for Glu to GAG and
[0570] substitution of all codons originally coding for Ala to GCC (or GCG) and
[0571] substitution of all codons originally coding for Arg to CGC (or CGG) and
[0572] substitution of all codons originally coding for Gly to GGC (or GGG) and
[0573] substitution of all codons originally coding for Asn to AAC and
[0574] substitution of all codons originally coding for Phe to UUC and
[0575] substitution of all codons originally coding for Cys to UGC and
[0576] substitution of all codons originally coding for Leu to CUG (or CUC) and
[0577] substitution of all codons originally coding for Gln to CAG and
[0578] substitution of all codons originally coding for Pro to CCC (or CCG) and
[0579] substitution of all codons originally coding for His to CAC and
[0580] substitution of all codons originally coding for Asp to GAC and
[0581] substitution of all codons originally coding for the stop codon to UGA (or UAG); etc.

[0582] Preferably, the G/C content of the coding region of the at least one coding RNA as described herein is increased by at least 7%, more preferably by at least 15%, particularly preferably by at least 20%, compared to the G/C content of the coding region of the wild type RNA. According to a specific embodiment at least 5%, 10%, 20%, 30%, 40%, 50%, 60%, more preferably at least 70%, even more preferably at least 80% and most preferably at least 90%, 95% or even 100% of the substitutable codons in the region coding for a protein or peptide as defined herein or its fragment or variant thereof or the whole sequence of the wild type RNA sequence or coding sequence are substituted, thereby increasing the G/C content of said sequence. In this context, it is particularly preferable to increase the G/C content of the at least one coding RNA as described herein to the maximum (i.e. 100% of the substitutable codons), in particular in the coding region, compared to the wild type sequence.

[0583] According to the invention, a further preferred modification of the coding sequence of the at least one coding RNA is based on the finding that the translation efficiency is also determined by a different frequency in the occurrence of tRNAs in cells. Thus, if so-called “rare codons” are present in the at least one coding region of the at least one coding RNA as described herein to an increased extent, the corresponding modified at least one coding RNA is translated to a significantly poorer degree than in the case where codons encoding relatively “frequent” tRNAs are present. According to the invention, in the modified at least one coding RNA as described herein, the region which encodes one of the above defined peptides or proteins is modified compared to the corresponding region of the wild type RNA such that at least one codon of the wild type sequence, which encodes a tRNA which is relatively rare in the cell, is exchanged for a codon, which enodes a tRNA which is relatively frequent in the cell and carries the same amino acid as the relatively rare tRNA. By this modification, the sequence of the at least one coding region of the at least one coding RNA as described herein is modified such that codons for which frequently occurring tRNAs are available are inserted. In other words, according to the invention, by this modification all codons of the wild type sequence which code for a tRNA which is relatively rare in the cell can in each case be exchanged for a codon which codes for a tRNA which is relatively frequent in the cell and which, in each case, carries the same amino acid as the relatively rare tRNA. Which tRNAs occur relatively frequently in the cell and which, in contrast, occur relatively rarely is known to a person skilled in the art; cf. e.g. Akashi, Curr. Opin. Genet. Dev. 2001, 11(6): 660-666. The codons which use for the particular amino acid the tRNA which occurs the most frequently, e.g. the Gly codon, which uses the tRNA, which occurs the most frequently in the (human) cell, are particularly preferred. According to the invention, it is particularly preferable to link the sequential G/C content which is increased, in particular maximized, in the modified at least one coding RNA as described herein, with the “frequent” codons without modifying the amino acid sequence of the protein encoded by the coding region of the RNA. This preferred embodiment allows provision of a particularly efficiently translated and stabilized (modified) at least one coding RNA as described herein. The determination of a modified at least one coding RNA as described herein (increased G/C content; exchange of tRNAs) can be carried out using the computer program explained in WO 02/098443—the disclosure content of which is included in its full scope in the present invention. Using this computer program, the nucleotide sequence of any desired coding RNA can be modified with the aid of the genetic code or the degenerative nature thereof such that a maximum G/C content results, in combination with the use of codons which code for tRNAs occurring as frequently as possible in the cell, the amino acid sequence coded by the modified at least one coding RNA preferably not being modified compared to the non-modified sequence. Alternatively, it is also possible to modify only the G/C content or only the codon usage compared to the original sequence. The source code in Visual Basic 6.0 (development environment used: Microsoft Visual Studio Enterprise 6.0 with Servicepack 3) is also described in WO 02/098443. In a further preferred embodiment of the present invention, the A/U content in the environment of the ribosome binding site of the at least one coding RNA as described herein is increased compared to the A/U content in the environment of the ribosome binding site of its particular wild type RNA. This modification (an increased A/U content around the ribosome binding site) increases the efficiency of ribosome binding to the at least one RNA. An effective binding of the ribosomes to the ribosome binding site (Kozak sequence: GCCGCCACCAUGG (SEQ ID NO: 429), the AUG forms the start codon) in turn has the effect of an efficient translation of the at least one coding RNA. According to a further embodiment of the present invention the at least one coding RNA as described herein may be modified with respect to potentially destabilizing sequence elements. Particularly, the coding region and/or the 5′ and/or 3′ untranslated region of this RNA may be modified compared to the particular wild type RNA such that it contains no destabilizing sequence elements, the coded amino acid sequence of the modified at least one coding RNA preferably not being modified compared to its particular wild type RNA. It is known that, for example, in sequences of eukaryotic RNAs destabilizing sequence elements (DSE) occur, to which signal proteins bind and regulate enzymatic degradation of RNA in vivo. For further stabilization of the modified at least one coding RNA, optionally in the region which encodes for a protein or peptide as defined herein, one or more such modifications compared to the corresponding region of the wild type RNA can therefore be carried out, so that no or substantially no destabilizing sequence elements are contained there. According to the invention, DSE present in the untranslated regions (3′- and/or 5′-UTR) can also be eliminated from the at least one coding RNA described herein by such modifications. Such destabilizing sequences are e.g. AU-rich sequences (AURES), which occur in 3′-UTR sections of numerous unstable RNAs (Caput et al., Proc. Natl. Acad. Sci. USA 1986, 83: 1670 to 1674). The at least one coding RNA as described herein is therefore preferably modified compared to the wild type RNA such that the at least one coding RNA contains no such destabilizing sequences. This also applies to those sequence motifs which are recognized by possible endonucleases, e.g. the sequence GAACAAG, which is contained in the 3′-UTR segment of the gene which codes for the transferrin receptor (Binder et al., EMBO J. 1994, 13: 1969 to 1980). These sequence motifs are also preferably removed in the at least one coding RNA as described herein.

[0584] In a preferred embodiment, the present invention thus provides the isRNA for use in the treatment of a tumor or cancer disease as described herein, wherein the treatment comprises administration of at least one coding RNA (as additional pharmaceutically active ingredient), preferably at least one mRNA, wherein the at least one coding sequence comprises
[0585] a) a nucleic acid sequence selected from the group consisting of SEQ ID NOs: 25-30; 80-85; 91-96; 102-107; 113-118; 601-606; 124-129; 135-140; 612-617; 623-628; 716-725; 727; 1018-1021 and 1059-1062, or a fragment or variant of any of these sequences, preferably from the group consisting of SEQ ID NOs: 32; 87; 98; 109; 120; 131; 142; 608; 619; 630; 632; 636-644; 726 and 1058, or a fragment or variant of any of these sequences;
[0586] b) a nucleic acid sequence selected from the group consisting of SEQ ID NOs: 33; 88; 99; 110; 121; 132; 143; 609; 620; 631; 728-738 and 1025-1028, or a fragment or variant of any of these sequences;
[0587] c) a nucleic acid sequence according to any one of SEQ ID NO: 646, 650-658, 662, 666-674 or 1029-1036, preferably according to any one of SEQ ID NO: 646 or 650-658, or a fragment or variant of any one of these nucleic acid sequences, and a nucleic acid sequence according to any one of SEQ ID NO: 678, 682-690, 694, 698-705, 707 or 1037-1041, preferably according to any one of SEQ ID NO: 678 or 682-690, or a fragment or variant of any of these nucleic acid sequences;
   [0588] or
   [0589] a nucleic acid sequence according to SEQ ID NO: 710 or 713, or a fragment or variant of any of these nucleic acid sequences, and/or
[0590] d) optionally, a nucleic acid sequence selected from the group consisting of SEQ ID NOs: 23; 78; 89; 100; 111; 122; 133; 599; 610; 621 and 1022-1024, or a fragment or variant of any of these sequences, preferably from the group consisting of SEQ ID NOs: 24; 79; 90; 101; 112; 123; 134; 600; 611; 622; 1043 and 1047-1054, or a fragment or variant of any of these sequences.

[0591] Adaptation to Human Codon Usage:

[0592] According to the invention, a further preferred modification of the at least one coding RNA as described herein is based on the finding that codons coding for the same amino acid occur in different frequencies. According to the invention, in the modified at least one coding RNA as described herein, the region which encodes at least one of the above defined peptides or proteins (coding sequence) is preferably modified compared to the corresponding region of the wild type RNA such that the frequency of the codons encoding the same amino acid corresponds to the naturally occurring frequency of that codon present in the human coding usage as e.g. shown in Table 2.

[0593] This means, for example, that for the amino acid alanine (Ala) present in the amino acid sequence of the encoded protein according to the invention, the wild type coding sequence is adapted in a way that the codon “GCC” is used with a frequency of 0.40, the codon “GCT” is used with a frequency of 0.28, the codon “GCA” is used with a frequency of 0.22 and the codon “GCG” is used with a frequency of 0.10 etc. (see Table 2).

TABLE 2
Human codon usage table (most frequent codon marked with an asterisk)

| Amino acid | codon | fraction | /1000 |
|---|---|---|---|
| Ala | GCG | 0.10 | 7.4 |
| Ala | GCA | 0.22 | 15.8 |
| Ala | GCT | 0.28 | 18.5 |
| Ala | GCC* | 0.40 | 27.7 |
| Cys | TGT | 0.42 | 10.6 |
| Cys | TGC* | 0.58 | 12.6 |
| Asp | GAT | 0.44 | 21.8 |
| Asp | GAC* | 0.56 | 25.1 |
| Glu | GAG* | 0.59 | 39.6 |
| Glu | GAA | 0.41 | 29.0 |
| Phe | TTT | 0.43 | 17.6 |
| Phe | TTC* | 0.57 | 20.3 |
| Gly | GGG | 0.23 | 16.5 |
| Gly | GGA | 0.26 | 16.5 |
| Gly | GGT | 0.18 | 10.8 |
| Gly | GGC* | 0.33 | 22.2 |
| His | CAT | 0.41 | 10.9 |
| His | CAC* | 0.59 | 15.1 |
| Ile | ATA | 0.14 | 7.5 |
| Ile | ATT | 0.35 | 16.0 |
| Ile | ATC* | 0.52 | 20.8 |
| Lys | AAG* | 0.60 | 31.9 |
| Lys | AAA | 0.40 | 24.4 |
| Leu | TTG | 0.12 | 12.9 |
| Leu | TTA | 0.06 | 7.7 |
| Leu | CTG* | 0.43 | 39.6 |
| Leu | CTA | 0.07 | 7.2 |
| Leu | CTT | 0.12 | 13.2 |
| Leu | CTC | 0.20 | 19.6 |
| Met | ATG* | 1 | 22.0 |
| Asn | AAT | 0.44 | 17.0 |
| Asn | AAC* | 0.56 | 19.1 |
| Pro | CCG | 0.11 | 6.9 |
| Pro | CCA | 0.27 | 16.9 |
| Pro | CCT | 0.29 | 17.5 |
| Pro | CCC* | 0.33 | 19.8 |
| Gin | CAG* | 0.73 | 34.2 |
| Gin | CAA | 0.27 | 12.3 |
| Arg | AGG | 0.22 | 12.0 |
| Arg | AGA* | 0.21 | 12.1 |
| Arg | CGG | 0.19 | 11.4 |
| Arg | CGA | 0.10 | 6.2 |
| Arg | CGT | 0.09 | 4.5 |
| Arg | CGC | 0.19 | 10.4 |
| Ser | AGT | 0.14 | 12.1 |
| Ser | AGC* | 0.25 | 19.5 |
| Ser | TCG | 0.06 | 4.4 |
| Ser | TCA | 0.15 | 12.2 |
| Ser | TCT | 0.18 | 15.2 |
| Ser | TCC | 0.23 | 17.7 |
| Thr | ACG | 0.12 | 6.1 |
| Thr | ACA | 0.27 | 15.1 |
| Thr | ACT | 0.23 | 13.1 |
| Thr | ACC* | 0.38 | 18.9 |
| Val | GTG* | 0.48 | 28.1 |
| Val | GTA | 0.10 | 7.1 |
| Val | GTT | 0.17 | 11.0 |
| Val | GTC | 0.25 | 14.5 |
| Trp | TGG* | 1 | 13.2 |
| Tyr | TAT | 0.42 | 12.2 |
| Tyr | TAC* | 0.58 | 15.3 |
| Stop | TGA* | 0.61 | 1.6 |
| Stop | TAG | 0.17 | 0.8 |
| Stop | TAA | 0.22 | 1.0 |

[0594] In a preferred embodiment, the present invention thus provides the isRNA for use in the treatment of a tumor or cancer disease as described herein, wherein the treatment comprises administration of at least one coding RNA (as additional pharmaceutically active ingredient), preferably at least one mRNA, wherein the at least one coding sequence comprises
[0595] a) a nucleic acid sequence selected from the group consisting of SEQ ID NOs: 47-52 and 58-63, or a fragment or variant of any of these sequences, preferably from the group consisting of SEQ ID NOs: 54; 65 and 634, or a fragment or variant of any of these sequences;
[0596] b) a nucleic acid sequence selected from the group consisting of SEQ ID NOs: 55-66, or a fragment or variant of any of these sequences;
[0597] c) a nucleic acid sequence according to any one of SEQ ID NO: 648, 659, 664 or 675, preferably according to SEQ ID NO: 648 or 659, or a fragment or variant of any one of these nucleic acid sequences, and a nucleic acid sequence according to any one of SEQ ID NO: 680, 691, 696 or 708, preferably according to SEQ ID NO: 680 or 691, or a fragment or variant of any of these nucleic acid sequences;
   [0598] or
   [0599] a nucleic acid sequence according to SEQ ID NO: 711 or 714, or a fragment or variant of any of these nucleic acid sequences, and/or
[0600] d) optionally, a nucleic acid sequence selected from the group consisting of SEQ ID NOs: 45 and 56, or a fragment or variant of any of these sequences, preferably from the group consisting of SEQ ID NOs: 46-57 and 1045, or a fragment or variant of any of these sequences.

[0601] Codon-Optimization:

[0602] According to a particularly preferred embodiment it is preferred, that all codons of the wild type sequence of the coding region of the at least one coding RNA as described herein which code for a tRNA which is relatively rare in the cell is in each case exchanged for a codon which codes for a tRNA which is relatively frequent in the cell and which, in each case, carries the same amino acid as the relatively rare tRNA. Therefore it is particularly preferred that the most frequent codons are used for each encoded amino acid (see Table 2, most frequent codons are marked with asterisks).

[0603] This means, for example, that for the amino acid alanine (Ala) present in the amino acid sequence of the encoded peptide or protein according to the invention, the wild type coding sequence is adapted in a way that the most frequent human codon “GCC” is always used for said amino acid, or for the amino acid Cysteine (Cys), the wild type sequence is adapted in a way that the most frequent human codon “TGC” is always used for said amino acid etc.

[0604] In a preferred embodiment, the present invention thus provides the isRNA for use in the treatment of a tumor or cancer disease as described herein, wherein the treatment comprises administration of at least one coding RNA (as additional pharmaceutically active ingredient), preferably at least one mRNA, wherein the at least one coding sequence comprises
[0605] a) a nucleic acid sequence selected from any one of SEQ ID NOs: 69 to 74, or a fragment or variant of any of these sequences, preferably a nucleic acid sequence according to SEQ ID NOs: 76 and 635, or a fragment or variant thereof;
[0606] b) a nucleic acid sequence according to SEQ ID NO: 77, or a fragment or variant thereof;
[0607] c) a nucleic acid sequence according to any one of SEQ ID NO: 649, 660, 665 or 676, preferably according to SEQ ID NO: 649 or 660, or a fragment or variant of any of these nucleic acid sequences, and a nucleic acid sequence according to any one of SEQ ID NO: 681, 692, 697 or 709, preferably according to SEQ ID NO: 681 or 692, or a fragment or variant of any of these nucleic acid sequences;
   [0608] or
   [0609] a nucleic acid sequence according to SEQ ID NO: 712 or 715, or a fragment or variant of any of these nucleic acid sequences, and/or
[0610] d) optionally, a nucleic acid sequence according to SEQ ID NO: 67, or a fragment or variant thereof, more preferably a nucleic acid sequence according to SEQ ID NO: 68 or 1046, or a fragment or variant thereof.

[0611] C-Enrichment:

[0612] According to another embodiment, the at least one coding RNA as described herein may be modified by increasing the C content of the RNA, preferably of the coding region of the at least one coding RNA.

[0613] In a particularly preferred embodiment of the present invention, the C content of the coding region of the at least one coding RNA as described herein is modified, particularly increased, compared to the C content of the coding region of its particular wild type RNA, i.e. the unmodified mRNA. The amino acid sequence encoded by the at least one coding RNA is preferably not modified as compared to the amino acid sequence encoded by the particular wild type RNA.

[0614] In a preferred embodiment of the present invention, the modified RNA is modified such that at least 10%, 20%, 30%, 40%, 50%, 60%, 70% or 80%, or at least 90% of the theoretically maximal cytosine-content or even a maximal cytosine-content is achieved.

[0615] In further preferred embodiments, at least 10%, 20%, 30%, 40%, 50%, 60%, 70%, 80%, 90% or even 100% of the codons of the RNA wild type sequence, which are “cytosine content optimizable” are replaced by codons with a higher cytosine-content as present in the wild type sequence.

[0616] In a further preferred embodiment, some of the codons of the wild type coding sequence may additionally be modified such that a codon for a relatively rare tRNA in the cell is exchanged by a codon for a relatively frequent tRNA in the cell, provided that the substituted codon for a relatively frequent tRNA carries the same amino acid as the relatively rare tRNA of the original wild type codon. Preferably, all of the codons for a relatively rare tRNA are replaced by a codon for a relatively frequent tRNA in the cell, except codons encoding amino acids, which are exclusively encoded by codons not containing any cytosine, or except for glutamine (Gln), which is encoded by two codons each containing the same number of cytosines.

[0617] In a further preferred embodiment of the present invention, the modified RNA is modified such that at least 80%, or at least 90% of the theoretically maximal cytosine-content or even a maximal cytosine-content is achieved by means of codons, which code for relatively frequent tRNAs in the cell, wherein the amino acid sequence remains unchanged.

[0618] Due to the naturally occurring degeneracy of the genetic code, more than one codon may encode a particular amino acid. Accordingly, 18 out of 20 naturally occurring amino acids are encoded by more than 1 codon (with Tryp and Met being an exception), e.g. by 2 codons (e.g. Cys, Asp, Glu), by three codons (e.g. Ile), by 4 codons (e.g. Al, Gly, Pro) or by 6 codons (e.g. Leu, Arg, Ser). However, not all codons encoding the same amino acid are utilized equally frequent under in vivo conditions. Depending on each single organism, a typical codon usage profile is established.

[0619] The term “cytosine content-optimizable codon” as used within the context of the present invention refers to codons, which exhibit a lower amount of cytosines than other codons coding for the same amino acid. Accordingly, any wild type codon, which may be replaced by another codon coding for the same amino acid and exhibiting a higher number of cytosines within that codon, is considered to be cytosine-optimizable (C-optimizable). Any such substitution of a C-optimizable wild type codon by the specific C-optimized codon within a wild type coding region increases its overall C-content and reflects a C-enriched modified RNA sequence. A C-maximized RNA sequence contains C-optimized codons for all potentially C-optimizable codons. Accordingly, 100% or all of the theoretically replaceable C-optimizable codons are under such conditions actually replaced by C-optimized codons over the entire length of the coding region.

[0620] In this context, cytosine-content optimizable codons are codons, which contain a lower number of cytosines than other codons coding for the same amino acid.

[0621] Any of the codons GCG, GCA, GCU codes for the amino acid Ala, which may be exchanged by the codon GCC encoding the same amino acid, and/or
[0622] the codon UGU that codes for Cys may be exchanged by the codon UGC encoding the same amino acid, and/or
[0623] the codon GAU which codes for Asp may be exchanged by the codon GAC encoding the same amino acid, and/or
[0624] the codon that UUU that codes for Phe may be exchanged for the codon UUC encoding the same amino acid, and/or
[0625] any of the codons GGG, GGA, GGU that code Gly may be exchanged by the codon GGC encoding the same amino acid, and/or
[0626] the codon CAU that codes for His may be exchanged by the codon CAC encoding the same amino acid, and/or
[0627] any of the codons AUA, AUU that code for Ile may be exchanged by the codon AUC, and/or
[0628] any of the codons UUG, UUA, CUG, CUA, CUU coding for Leu may be exchanged by the codon CUC encoding the same amino acid, and/or
[0629] the codon AAU that codes for Asn may be exchanged by the codon MC encoding the same amino acid, and/or
[0630] any of the codons CCG, CCA, CCU coding for Pro may be exchanged by the codon CCC encoding the same amino acid, and/or
[0631] any of the codons AGG, AGA, CGG, CGA, CGU coding for Arg may be exchanged by the codon CGC encoding the same amino acid, and/or
[0632] any of the codons AGU, AGC, UCG, UCA, UCU coding for Ser may be exchanged by the codon UCC encoding the same amino acid, and/or
[0633] any of the codons ACG, ACA, ACU coding for Thr may be exchanged by the codon ACC encoding the same amino acid, and/or
[0634] any of the codons GUG, GUA, GUU coding for Val may be exchanged by the codon GUC encoding the same amino acid, and/or
[0635] the codon UAU coding for Tyr may be exchanged by the codon UAC encoding the same amino acid.

[0636] In any of the above instances, the number of cytosines is increased by 1 per exchanged codon. Exchange of all non C-optimized codons (corresponding to C-optimizable codons) of the coding region results in a C-maximized coding sequence. In the context of the invention, at least 70% of the non C-optimized codons are replaced by C-optimized codons of the wild type sequence are replaced by C-optimized codons, preferably at least 80%, more preferably at least 90% within the coding region.

[0637] It may be preferred that for some amino acids the percentage of C-optimizable codons replaced by C-optimized codons is less than 70%, while for other amino acids the percentage of replaced codons is higher than 70% to meet the overall percentage of C-optimization of at least 70% of all C-optimizable wild type codons of the coding region.

[0638] Preferably, in the C-optimized RNAs of the invention, at least 50% of the C-optimizable wild type codons for any given amino acid are replaced by C-optimized codons, e.g. any modified C-enriched RNA preferably contains at least 50% C-optimized codons at C-optimizable wild type codon positions coding for any single of the above mentioned amino acids Ala, Cys, Asp, Phe, Gly, His, Ile, Leu, Asn, Pro, Arg, Ser, Thr, Val and Tyr, preferably at least 60%.

[0639] In this context, codons encoding amino acids, which are not cytosine content-optimizable and which are, however, encoded by at least two codons, may be used without any further selection process. However, the codon of the wild type sequence that codes for a relatively rare tRNA in the cell, e.g. a human cell, may be exchanged for a codon that codes for a relatively frequent tRNA in the cell, whereby both code for the same amino acid. Accordingly, the relatively rare codon GM coding for Glu may be exchanged by the relative frequent codon GAG coding for the same amino acid, and/or

[0640] the relatively rare codon AAA coding for Lys may be exchanged by the relative frequent codon AAG coding for the same amino acid, and/or

[0641] the relatively rare codon CM coding for Gln is exchanged for the relative frequent codon CAG encoding the same amino acid.

[0642] In this context, the amino acids Met (AUG) and Trp (UGG), which are encoded by only one codon each, remain unchanged. Stop codons are not cytosine-content optimized, however, the relatively rare stop codons amber, ochre (UAA, UAG) may be exchanged by the relatively frequent stop codon opal (UGA).

[0643] The substitutions listed above may obviously be used individually but also in all possible combinations in order to optimize the cytosine-content of the modified RNA compared to the wild type RNA sequence.

[0644] Accordingly, the region of the modified RNA encoding a peptide or protein may be changed compared to the coding region of the wild type RNA in such a way that an amino acid encoded by at least two or more codons, of which one comprises one additional cytosine, such a codon may be exchanged by the C-optimized codon comprising one additional cytosine, whereby the amino acid is unaltered compared to the wild type sequence.

[0645] In a preferred embodiment, the present invention thus provides the isRNA for use in the treatment of a tumor or cancer disease as described herein, wherein the treatment comprises administration of at least one coding RNA (as additional pharmaceutically active ingredient), preferably at least one mRNA, wherein the at least one coding sequence comprises
[0646] a) a nucleic acid sequence selected from any one of SEQ ID NOs: 36 to 41, or a fragment or variant of any of these sequences, preferably a nucleic acid according to SEQ ID NO: 43 and 633 or a fragment or variant thereof;
[0647] b) a nucleic acid sequence according to SEQ ID NO: 44, or a fragment or variant thereof,
[0648] c) a nucleic acid sequence according to SEQ ID NO: 647 or 663, preferably according to SEQ ID NO: 647, or a fragment or variant of any of these nucleic acid sequences, and a nucleic acid sequence according to SEQ ID NO: 679 or 695, preferably according to SEQ ID NO: 679, or a fragment or variant of any of these nucleic acid sequences, and/or
[0649] d) optionally, a nucleic acid sequence according to SEQ ID NO: 34, or a fragment or variant thereof, preferably a nucleic acid sequence according to SEQ ID NO: 35 and 1044, or a fragment or variant thereof.

[0650] According to a further embodiment, the at least one coding RNA as described herein preferably comprises at least one of the following structural elements: a 5′- and/or 3′-untranslated region element (UTR element), particularly a 5′-UTR element which comprises or consists of a nucleic acid sequence, which is derived from the 5′-UTR of a TOP gene or from a fragment, homolog or a variant thereof, or a 5′- and/or 3′-UTR element which may be derivable from a gene that provides a stable mRNA or from a homolog, fragment or variant thereof; a histone stem-loop structure, preferably a histone stem-loop in its 3′ untranslated region; a 5′-CAP structure; a poly-A tail (poly(A) sequence); or a poly(C) sequence.

[0651] In a preferred embodiment the at least one coding RNA as described herein comprises at least one 5′- or 3′-UTR element. In this context an UTR element comprises or consists of a nucleic acid sequence, which is derived from the 5′- or 3′-UTR of any naturally occurring gene or which is derived from a fragment, a homolog or a variant of the 5′- or 3′-UTR of a gene. Preferably, the 5′- or 3′-UTR element used according to the present invention is heterologous to the coding region of the at least one coding RNA as described herein. Even if 5′- or 3′-UTR elements derived from naturally occurring genes are preferred, also synthetically engineered UTR elements may be used in the context of the present invention.

[0652] In a particularly preferred embodiment, the at least one coding RNA comprises at least one 5′-untranslated region element (5′-UTR element), which comprises or consists of a nucleic acid sequence, which is derived from the 5′-UTR of a TOP gene or which is derived from a fragment, homolog or variant of the 5′-UTR of a TOP gene.

[0653] It is particularly preferred that the 5′-UTR element does not comprise a TOP-motif or a 5′-TOP, as defined above.

[0654] In some embodiments, the nucleic acid sequence of the 5′-UTR element, which is derived from a 5′-UTR of a TOP gene, terminates at its 3′-end with a nucleotide located at position 1, 2, 3, 4, 5, 6, 7, 8, 9 or 10 upstream of the start codon (e.g. A(U/T)G) of the gene or mRNA it is derived from. Thus, the 5′-UTR element does not comprise any part of the protein coding region. Thus, preferably, the only protein coding part of the at least one coding RNA as described herein is provided by the coding region.

[0655] The nucleic acid sequence, which is derived from the 5′-UTR of a TOP gene, is preferably derived from a eukaryotic TOP gene, preferably a plant or animal TOP gene, more preferably a chordate TOP gene, even more preferably a vertebrate TOP gene, most preferably a mammalian TOP gene, such as a human TOP gene.

[0656] For example, the 5′-UTR element is preferably selected from 5′-UTR elements comprising or consisting of a nucleic acid sequence which is derived from a nucleic acid sequence selected from the group consisting of SEQ ID Nos. 1-1363, SEQ ID NO: 1395, SEQ ID NO: 1421 and SEQ ID NO: 1422 of the patent application WO2013/143700, the disclosure of which is incorporated herein by reference, from the homologs of SEQ ID Nos: 1-1363, SEQ ID NO: 1395, SEQ ID NO: 1421 and SEQ ID NO: 1422 of the patent application WO2013/143700, from a variant thereof, or preferably from a corresponding RNA sequence. The term “homologs of SEQ ID Nos: 1-1363, SEQ ID NO: 1395, SEQ ID NO: 1421 and SEQ ID NO: 1422 of the patent application WO2013/143700” refers to sequences of other species than Homo sapiens, which are homologous to the sequences according to SEQ ID Nos. 1-1363, SEQ ID NO: 1395, SEQ ID NO: 1421 and SEQ ID NO: 1422 of the patent application WO2013/143700.

[0657] In a preferred embodiment, the 5′-UTR element comprises or consists of a nucleic acid sequence, which is derived from a nucleic acid sequence extending from nucleotide position 5 (i.e. the nucleotide that is located at position 5 in the sequence) to the nucleotide position immediately 5′ to the start codon (located at the 3′ end of the sequences), e.g. the nucleotide position immediately 5′ to the ATG sequence, of a nucleic acid sequence selected from SEQ ID Nos. 1-1363, SEQ ID NO: 1395, SEQ ID NO: 1421 and SEQ ID NO: 1422 of the patent application WO2013/143700, from the homologs of SEQ ID Nos: 1-1363, SEQ ID NO: 1395, SEQ ID NO: 1421 and SEQ ID NO: 1422 of the patent application WO2013/143700 from a variant thereof, or a corresponding RNA sequence. It is particularly preferred that the 5′-UTR element is derived from a nucleic acid sequence extending from the nucleotide position immediately 3′ to the 5′-TOP to the nucleotide position immediately 5′ to the start codon (located at the 3′ end of the sequences), e.g. the nucleotide position immediately 5′ to the ATG sequence, of a nucleic acid sequence selected from SEQ ID Nos: 1-1363, SEQ ID NO: 1395, SEQ ID NO: 1421 and SEQ ID NO: 1422 of the patent application WO2013/143700, from the homologs of SEQ ID Nos. 1-1363, SEQ ID NO: 1395, SEQ ID NO: 1421 and SEQ ID NO: 1422 of the patent application WO2013/143700, from a variant thereof, or a corresponding RNA sequence.

[0658] In some embodiments, the 5′-UTR element may be any 5′-UTR element described in WO2016/107877. In this context, the disclosure of WO2016/107877 relating to 5′-UTR elements/sequences is herewith incorporated by reference. Particularly preferred 5′-UTR elements are nucleic acid sequences according to SEQ ID NOs: 25 to 30 and SEQ ID NOs: 319 to 382 of the patent application WO2016/107877, or fragments or variants of these sequences. In this context, it is particularly preferred that the 5′-UTR element comprises or consists of a corresponding RNA sequence of the nucleic acid sequence according SEQ ID NOs: 25 to 30 and SEQ ID NOs: 319 to 382 of the patent application WO2016/107877.

[0659] In certain embodiments, the 5′-UTR element may be any 5′-UTR element as described in WO2017/036580. In this context, the disclosure of WO2017/036580 relating to 5′-UTR elements/sequences is herewith incorporated by reference. Particularly preferred 5′-UTR elements are nucleic acid sequences according to SEQ ID NOs: 1 to 151 of the patent application WO2017/036580, or fragments or variants of these sequences. In this context, it is particularly preferred that the 5′-UTR element comprises or consists of a corresponding RNA sequence of the nucleic acid sequence according to SEQ ID NOs: 1 to 151 of the patent application WO2017/036580.

[0660] In a particularly preferred embodiment, the 5′-UTR element comprises or consists of a nucleic acid sequence, which is derived from a 5′-UTR of a TOP gene encoding a ribosomal protein or from a variant of a 5′-UTR of a TOP gene encoding a ribosomal protein. For example, the 5′-UTR element comprises or consists of a nucleic acid sequence which is derived from a 5′-UTR of a nucleic acid sequence according to any of SEQ ID NOs: 67, 170, 193, 244, 259, 554, 650, 675, 700, 721, 913, 1016, 1063, 1120, 1138, and 1284-1360 of the patent application WO2013/143700, a corresponding RNA sequence, a homolog thereof, or a variant thereof as described herein, preferably lacking the 5′-TOP motif. As described above, the sequence extending from position 5 to the nucleotide immediately 5′ to the ATG (which is located at the 3′end of the sequences) corresponds to the 5′-UTR of said sequences.

[0661] Preferably, the 5′-UTR element comprises or consists of a nucleic acid sequence, which is derived from a 5′-UTR of a TOP gene encoding a ribosomal large protein (RPL) or from a homolog or variant of a 5′-UTR of a TOP gene encoding a ribosomal large protein (RPL). For example, the 5′-UTR element comprises or consists of a nucleic acid sequence which is derived from a 5′-UTR of a nucleic acid sequence according to any of SEQ ID NOs: 67, 259, 1284-1318, 1344, 1346, 1348-1354, 1357, 1358, 1421 and 1422 of the patent application WO2013/143700, a corresponding RNA sequence, a homolog thereof, or a variant thereof as described herein, preferably lacking the 5′-TOP motif.

[0662] In a particularly preferred embodiment, the 5′-UTR element comprises or consists of a nucleic acid sequence which is derived from the 5′-UTR of a ribosomal protein Large 32 gene, preferably from a vertebrate ribosomal protein Large 32 (L32) gene, more preferably from a mammalian ribosomal protein Large 32 (L32) gene, most preferably from a human ribosomal protein Large 32 (L32) gene, or from a variant of the 5′-UTR of a ribosomal protein Large 32 gene, preferably from a vertebrate ribosomal protein Large 32 (L32) gene, more preferably from a mammalian ribosomal protein Large 32 (L32) gene, most preferably from a human ribosomal protein Large 32 (L32) gene, wherein preferably the 5′-UTR element does not comprise the 5′-TOP of said gene.

[0663] A preferred sequence for a 5′-UTR element corresponds to SEQ ID NO: 1368 of the patent application WO2013/143700.

[0664] Accordingly, in a particularly preferred embodiment, the 5′-UTR element comprises or consists of a nucleic acid sequence, which has an identity of at least about 20%, preferably of at least about 40%, preferably of at least about 50%, preferably of at least about 60%, preferably of at least about 70%, more preferably of at least about 80%, more preferably of at least about 90%, even more preferably of at least about 95%, even more preferably of at least about 99% to the nucleic acid sequence as mentioned above (according to SEQ ID NO: 408 (5′-UTR of human ribosomal protein Large 32 lacking the 5′ terminal oligopyrimidine tract:

(SEQ ID NO: 1075)
GGCGCTGCCTACGGAGGTGGCAGCCATCTCCTTCTCGGCATC;

corresponding to SEQ ID NO: 1368 of the patent application WO2013/143700)) or preferably to a corresponding RNA sequence, or wherein the at least one 5′UTR element comprises or consists of a fragment of a nucleic acid sequence which has an identity of at least about 40%, preferably of at least about 50%, preferably of at least about 60%, preferably of at least about 70%, more preferably of at least about 80%, more preferably of at least about 90%, even more preferably of at least about 95%, even more preferably of at least about 99% to the nucleic acid sequence according to SEQ ID NO: 409 or more preferably to a corresponding RNA sequence, wherein, preferably, the fragment is as described above, i.e. being a continuous stretch of nucleotides representing at least 20% etc. of the full-length 5′-UTR.

[0665] Preferably, the fragment exhibits a length of at least about 20 nucleotides or more, preferably of at least about 30 nucleotides or more, more preferably of at least about 40 nucleotides or more. Preferably, the fragment is a functional fragment as described herein.

[0666] In some embodiments, the at least one coding RNA as described herein comprises a 5′-UTR element, which comprises or consists of a nucleic acid sequence, which is derived from the 5′-UTR of a vertebrate TOP gene, such as a mammalian, e.g. a human TOP gene, selected from RPSA, RPS2, RPS3, RPS3A, RPS4, RPS5, RPS6, RPS7, RPS8, RPS9, RPS10, RPS11, RPS12, RPS13, RPS14, RPS15, RPS15A, RPS16, RPS17, RPS18, RPS19, RPS20, RPS21, RPS23, RPS24, RPS25, RPS26, RPS27, RPS27A, RPS28, RPS29, RPS30, RPL3, RPL4, RPL5, RPL6, RPL7, RPL7A, RPL8, RPL9, RPL10, RPL10A, RPL11, RPL12, RPL13, RPL13A, RPL14, RPL15, RPL17, RPL18, RPL18A, RPL19, RPL21, RPL22, RPL23, RPL23A, RPL24, RPL26, RPL27, RPL27A, RPL28, RPL29, RPL30, RPL31, RPL32, RPL34, RPL35, RPL35A, RPL36, RPL36A, RPL37, RPL37A, RPL38, RPL39, RPL40, RPL41, RPLP0, RPLP1, RPLP2, RPLP3, RPLP0, RPLP1, RPLP2, EEF1A1, EEF1B2, EEF1D, EEF1G, EEF2, EIF3E, EIF3F, EIF3H, EIF2S3, EIF3C, EIF3K, EIF3EIP, EIF4A2, PABPC1, HNRNPA1, TPT1, TUBB1, UBA52, NPM1, ATP5G2, GNB2L1, NME2, UQCRB, or from a homolog or variant thereof, wherein preferably the 5′-UTR element does not comprise a TOP-motif or the 5′-TOP of said genes, and wherein optionally the 5′-UTR element starts at its 5′-end with a nucleotide located at position 1, 2, 3, 4, 5, 6, 7, 8, 9 or 10 downstream of the 5′ terminal oligopyrimidine tract (TOP) and wherein further optionally the 5′-UTR element which is derived from a 5′-UTR of a TOP gene terminates at its 3′-end with a nucleotide located at position 1, 2, 3, 4, 5, 6, 7, 8, 9 or 10 upstream of the start codon (A(U/T)G) of the gene it is derived from.

[0667] In certain embodiments, the at least one coding RNA as described herein comprises a 5′-UTR element, which comprises or consists of a nucleic acid sequence, which is derived from the 5′-UTR of a gene selected from the group consisting of Mp68 (6.8 kDa mitochondrial proteolipid), Nosip (Nitric oxide synthase-interacting protein), HSD17B4 (hydroxysteroid (17-beta) dehydrogenase 4), Rpl31 (60S ribosomal protein L31), TUBB4B (Tubulin beta-4B chain), ATP5A1 (ATP synthase subunit alpha (mitochondrial)) and Ndufa4.1 (Cytochrome c oxidase subunit NDUFA4), or from a variant of any of these genes, wherein the gene or the variant thereof is preferably a vertebrate gene, more preferably a mammalian gene, and even more preferably a human gene.

[0668] According to a further preferred embodiment, the at least one coding RNA as described herein comprises a 5′-UTR element, which comprises or consists of a nucleic acid sequence, which is derived from the 5′-UTR of a gene selected from the group consisting of Mp68 (6.8 kDa mitochondrial proteolipid), Nosip (Nitric oxide synthase-interacting protein), HSD17B4 (hydroxysteroid (17-beta) dehydrogenase 4), Rpl31 (60S ribosomal protein L31), TUBB4B (Tubulin beta-4B chain), ATP5A1 (ATP synthase subunit alpha (mitochondrial)), Ndufa4.1 (Cytochrome c oxidase subunit NDUFA4), ribosomal protein Large 32 gene (RPL32), a ribosomal protein Large 35 gene (RPL35), a ribosomal protein Large 21 gene (RPL21), an ATP synthase, H+ transporting, mitochondrial F1 complex, alpha subunit 1, cardiac muscle (ATP5A1) gene, an androgen-induced 1 gene (AIG1), cytochrome c oxidase subunit VIc gene (COX6C) and a N-acylsphingosine amidohydrolase (acid ceramidase) 1 gene (ASAH1), or from a variant of any of these genes, wherein the gene or the variant thereof is preferably a vertebrate gene, more preferably a mammalian gene, and even more preferably a human gene.

[0669] In further particularly preferred embodiments, the 5′-UTR element comprises or consists of a nucleic acid sequence, which is derived from the 5′-UTR of a ribosomal protein Large 32 gene (RPL32), a ribosomal protein Large 35 gene (RPL35), a ribosomal protein Large 21 gene (RPL21), an ATP synthase, H+transporting, mitochondrial F1 complex, alpha subunit 1, cardiac muscle (ATP5A1) gene, an hydroxysteroid (17-beta) dehydrogenase 4 gene (HSD17B4), an androgen-induced 1 gene (AIG1), cytochrome c oxidase subunit VIc gene (COX6C), or a N-acylsphingosine amidohydrolase (acid ceramidase) 1 gene (ASAH1) or from a variant thereof, preferably from a vertebrate ribosomal protein Large 32 gene (RPL32), a vertebrate ribosomal protein Large 35 gene (RPL35), a vertebrate ribosomal protein Large 21 gene (RPL21), a vertebrate ATP synthase, H+ transporting, mitochondrial F1 complex, alpha subunit 1, cardiac muscle (ATP5A1) gene, a vertebrate hydroxysteroid (17-beta) dehydrogenase 4 gene (HSD17B4), a vertebrate androgen-induced 1 gene (AIG1), a vertebrate cytochrome c oxidase subunit VIc gene (COX6C), or a vertebrate N-acylsphingosine amidohydrolase (acid ceramidase) 1 gene (ASAH1) or from a variant thereof, more preferably from a mammalian ribosomal protein Large 32 gene (RPL32), a ribosomal protein Large 35 gene (RPL35), a ribosomal protein Large 21 gene (RPL21), a mammalian ATP synthase, H+ transporting, mitochondrial F1 complex, alpha subunit 1, cardiac muscle (ATP5A1) gene, a mammalian hydroxysteroid (17-beta) dehydrogenase 4 gene (HSD17B4), a mammalian androgen-induced 1 gene (AIG1), a mammalian cyto-chrome c oxidase subunit VIc gene (COX6C), or a mammalian N-acylsphingosine ami-dohydrolase (acid ceramidase) 1 gene (ASAH1) or from a variant thereof, most preferably from a human ribosomal protein Large 32 gene (RPL32), a human ribosomal protein Large 35 gene (RPL35), a human ribosomal protein Large 21 gene (RPL21), a human ATP synthase, H+transporting, mitochondrial F1 complex, alpha subunit 1, cardiac muscle (ATP5A1) gene, a human hydroxysteroid (17-beta) dehydrogenase 4 gene (HSD17B4), a human androgen-induced 1 gene (AIG1), a human cytochrome c oxidase subunit VIc gene (COX6C), or a human N-acylsphingosine amidohydrolase (acid ceramidase) 1 gene (ASAH1) or from a variant thereof, wherein preferably the 5′-UTR element does not comprise the 5′-TOP of said gene.

[0670] Accordingly, in a particularly preferred embodiment, the 5′-UTR element comprises or consists of a nucleic acid sequence, which has an identity of at least about 40%, preferably of at least about 50%, preferably of at least about 60%, preferably of at least about 70%, more preferably of at least about 80%, more preferably of at least about 90%, even more preferably of at least about 95%, even more preferably of at least about 99% to the nucleic acid sequence according to SEQ ID NO: 1368, or SEQ ID NOs: 1412-1420 of the patent application WO2013/143700, or a corresponding RNA sequence, or wherein the at least one 5′-UTR element comprises or consists of a fragment of a nucleic acid sequence which has an identity of at least about 20%, preferably of at least about 40%, preferably of at least about 50%, preferably of at least about 60%, preferably of at least about 70%, more preferably of at least about 80%, more preferably of at least about 90%, even more preferably of at least about 95%, even more preferably of at least about 99% to the nucleic acid sequence according to SEQ ID NO: 1368, or SEQ ID NOs: 1412-1420 of the patent application WO2013/143700, wherein, preferably, the fragment is as described above, i.e. being a continuous stretch of nucleotides representing at least 20% etc. of the full-length 5′-UTR. Preferably, the fragment exhibits a length of at least about 20 nucleotides or more, preferably of at least about 30 nucleotides or more, more preferably of at least about 40 nucleotides or more. Preferably, the fragment is a functional fragment as described herein.

[0671] According to a particularly preferred embodiment, the 5′-UTR element comprises or consists of a nucleic acid sequence, which has an identity of at least about 40%, preferably of at least about 50%, preferably of at least about 60%, preferably of at least about 70%, more preferably of at least about 80%, more preferably of at least about 90%, even more preferably of at least about 95%, even more preferably of at least about 99% to the nucleic acid sequence according to any one of SEQ ID NO: 838, 840, 842, 844, 846, 848, 850, or 1004-1013, or a corresponding RNA sequence, or wherein the at least one 5′-UTR element comprises or consists of a fragment of a nucleic acid sequence which has an identity of at least about 20%, preferably of at least about 40%, preferably of at least about 50%, preferably of at least about 60%, preferably of at least about 70%, more preferably of at least about 80%, more preferably of at least about 90%, even more preferably of at least about 95%, even more preferably of at least about 99% to the nucleic acid sequence according to any one of SEQ ID NO: 838, 840, 842, 844, 846, 848, 850, or 1004-1013, wherein, preferably, the fragment is as described above, i.e. being a continuous stretch of nucleotides representing at least 20% etc. of the full-length 5′-UTR. Preferably, the fragment exhibits a length of at least about 20 nucleotides or more, preferably of at least about 30 nucleotides or more, more preferably of at least about 40 nucleotides or more. Preferably, the fragment is a functional fragment as described herein.

[0672] In a further preferred embodiment, the 5′-UTR element comprises or consists of a nucleic acid sequence, which has an identity of at least about 40%, preferably of at least about 50%, preferably of at least about 60%, preferably of at least about 70%, more preferably of at least about 80%, more preferably of at least about 90%, even more preferably of at least about 95%, even more preferably of at least about 99% to the nucleic acid sequence according to any one of SEQ ID NO: 838, 840, 842, 844, 846, 848 or 850, or a corresponding RNA sequence, preferably selected from SEQ ID NO: 839, 841, 843, 845, 847, 849 and 851, or wherein the at least one 5′-UTR element comprises or consists of a fragment of a nucleic acid sequence which has an identity of at least about 20%, preferably of at least about 40%, preferably of at least about 50%, preferably of at least about 60%, preferably of at least about 70%, more preferably of at least about 80%, more preferably of at least about 90%, even more preferably of at least about 95%, even more preferably of at least about 99% to the nucleic acid sequence according to any one of SEQ ID NO: 838, 840, 842, 844, 846, 848 or 850, wherein, preferably, the fragment is as described above, i.e. being a continuous stretch of nucleotides representing at least 20% etc. of the full-length 5′-UTR. Preferably, the fragment exhibits a length of at least about 20 nucleotides or more, preferably of at least about 30 nucleotides or more, more preferably of at least about 40 nucleotides or more. Preferably, the fragment is a functional fragment as described herein.

[0673] Accordingly, in a particularly preferred embodiment, the 5′-UTR element comprises or consists of a nucleic acid sequence, which has an identity of at least about 20%, preferably of at least about 40%, preferably of at least about 50%, preferably of at least about 60%, preferably of at least about 70%, more preferably of at least about 80%, more preferably of at least about 90%, even more preferably of at least about 95%, even more preferably of at least about 99% to the nucleic acid sequence according to SEQ ID NO: 410 (5′-UTR of ATP5A1 lacking the 5′ terminal oligopyrimidine tract: GCGGCTCGGCCATTTTGTCCCAGTCAGTCCGGAGGCTGCGGCTGCAGAAGTACCGCCTGCGGAGTAACTGCAAAG (SEQ ID NO: 1076); corresponding to SEQ ID NO: 1414 of the patent application WO2013/143700 (5′-UTR of ATP5A1 lacking the 5′ terminal oligopyrimidine tract) or preferably to a corresponding RNA sequence (SEQ ID NO: 411), or wherein the at least one 5′UTR element comprises or consists of a fragment of a nucleic acid sequence which has an identity of at least about 40%, preferably of at least about 50%, preferably of at least about 60%, preferably of at least about 70%, more preferably of at least about 80%, more preferably of at least about 90%, even more preferably of at least about 95%, even more preferably of at least about 99% to the nucleic acid sequence according to SEQ ID NO: 26 (of the patent application WO2013/143700) or more preferably to a corresponding RNA sequence, wherein, preferably, the fragment is as described above, i.e. being a continuous stretch of nucleotides representing at least 20% etc. of the full-length 5′-UTR. Preferably, the fragment exhibits a length of at least about 20 nucleotides or more, preferably of at least about 30 nucleotides or more, more preferably of at least about 40 nucleotides or more. Preferably, the fragment is a functional fragment as described herein.

[0674] In a further preferred embodiment, the at least one coding RNA as described herein further comprises at least one 3′-UTR element, which comprises or consists of a nucleic acid sequence derived from the 3′-UTR of a chordate gene, preferably a vertebrate gene, more preferably a mammalian gene, most preferably a human gene, or from a variant of the 3′-UTR of a chordate gene, preferably a vertebrate gene, more preferably a mammalian gene, most preferably a human gene.

[0675] The term ‘3’-UTR element′ refers to a nucleic acid sequence, which comprises or consists of a nucleic acid sequence that is derived from a 3′-UTR or from a variant of a 3′-UTR. A 3′-UTR element in the sense of the present invention may represent the 3′-UTR of an mRNA. Thus, in the sense of the present invention, preferably, a 3′-UTR element may be the 3′-UTR of an mRNA, preferably of an artificial mRNA, or it may be the transcription template for a 3′-UTR of an mRNA. Thus, a 3′-UTR element preferably is a nucleic acid sequence, which corresponds to the 3′-UTR of an mRNA, preferably to the 3′-UTR of an artificial mRNA, such as an mRNA obtained by transcription of a genetically engineered vector construct. Preferably, the 3′-UTR element fulfils the function of a 3′-UTR or encodes a sequence, which fulfils the function of a 3′-UTR.

[0676] Preferably, the inventive mRNA comprises a 3′-UTR element which may be derivable from a gene that relates to an mRNA with an enhanced half-life (that provides a stable mRNA), for example a 3′-UTR element as defined and described below. Preferably, the 3′ UTR element, is a nucleic acid sequence derived from a 3′ UTR of a gene, which preferably encodes a stable mRNA, or from a homolog, a fragment or a variant of said gene

[0677] In a particularly preferred embodiment, the 3′-UTR element comprises or consists of a nucleic acid sequence which is derived from a 3′-UTR of a gene selected from the group consisting of an albumin gene, an α-globin gene, a β-globin gene, a tyrosine hydroxylase gene, a lipoxygenase gene, and a collagen alpha gene, such as a collagen alpha 1(I) gene, or from a variant of a 3′-UTR of a gene selected from the group consisting of an albumin gene, an α-globin gene, a β-globin gene, a tyrosine hydroxylase gene, a lipoxygenase gene, and a collagen alpha gene, such as a collagen alpha 1(I) gene according to SEQ ID NO: 1369-1390 of the patent application WO2013/143700 whose disclosure is incorporated herein by reference. In a particularly preferred embodiment, the 3′-UTR element comprises or consists of a nucleic acid sequence, which is derived from a 3′-UTR of an albumin gene, preferably a vertebrate albumin gene, more preferably a mammalian albumin gene, most preferably a human albumin gene, most preferably a human albumin gene according to SEQ ID NO: 420 (according SEQ ID No: 1369 of the patent application WO2013/143700). The mRNA sequence may comprise or consist of a nucleic acid sequence which is derived from the 3′-UTR of the human albumin gene according to GenBank Accession number NM_000477.5, or from a fragment or variant thereof.

[0678] In this context it is particularly preferred that the at least one coding RNA as described herein comprises a 3′-UTR element comprising a corresponding RNA sequence derived from the nucleic acids according to SEQ ID NO: 1369-1390 of the patent application WO2013/143700 or a fragment, homolog or variant thereof.

[0679] Most preferably, the 3′-UTR element comprises the nucleic acid sequence derived from a fragment of the human albumin gene (albumin7 3′UTR) according to SEQ ID NO: 422 or 424 (according to SEQ ID No: 1376 of the patent application WO2013/143700).

[0680] In this context it is particularly preferred that the 3′-UTR element of the at least one RNA of the inventive composition comprises or consists of a corresponding RNA sequence of the nucleic acid sequence according to SEQ ID NO: 423 or 425.

[0681] In another particularly preferred embodiment, the 3′-UTR element comprises or consists of a nucleic acid sequence which is derived from a 3′-UTR of an α-globin gene, preferably a vertebrate α- or β-globin gene, more preferably a mammalian α- or β-globin gene, most preferably a human α- or β-globin gene according to SEQ ID NO: 412 (corresponding to SEQ ID NO: 1370 of the patent application WO2013/143700 (3′-UTR of Homo sapiens hemoglobin, alpha 1 (HBA1))), or according to SEQ ID NO: 414 (corresponding to SEQ ID NO: 1371 of the patent application WO2013/143700 (3′-UTR of Homo sapiens hemoglobin, alpha 2 (HBA2))), and/or according to SEQ ID NO: 416 (corresponding to SEQ ID NO: 1372 of the patent application WO2013/143700 (3′-UTR of Homo sapiens hemoglobin, beta (HBB)).

[0682] For example, the 3′-UTR element may comprise or consist of the center, α-complex-binding portion of the 3′-UTR of an α-globin gene, according to SEQ ID NO: 418 (corresponding to SEQ ID NO: 1393 of the patent application WO2013/143700).

[0683] In this context it is particularly preferred that the 3′-UTR element of the RNA of the inventive composition comprises or consists of a corresponding RNA sequence of the nucleic acid sequence according to SEQ ID NO: 419, according to the above or a homolog, a fragment or variant thereof.

[0684] The term ‘a nucleic acid sequence which is derived from the 3’-UTR of a [ . . . ] gene′ preferably refers to a nucleic acid sequence which is based on the 3′-UTR sequence of a [ . . . ] gene or on a part thereof, such as on the 3′-UTR of an albumin gene, an α-globin gene, a β-globin gene, a tyrosine hydroxylase gene, a lipoxygenase gene, or a collagen alpha gene, such as a collagen alpha 1(I) gene, preferably of an albumin gene or on a part thereof. This term includes sequences corresponding to the entire 3′-UTR sequence, i.e. the full length 3′-UTR sequence of a gene, and sequences corresponding to a fragment of the 3′-UTR sequence of a gene, such as an albumin gene, α-globin gene, β-globin gene, tyrosine hydroxylase gene, lipoxygenase gene, or collagen alpha gene, such as a collagen alpha 1(I) gene, preferably of an albumin gene.

[0685] The term ‘a nucleic acid sequence which is derived from a variant of the 3’-UTR of a [ . . . ] gene′ preferably refers to a nucleic acid sequence which is based on a variant of the 3′-UTR sequence of a gene, such as on a variant of the 3′-UTR of an albumin gene, an α-globin gene, a β-globin gene, a tyrosine hydroxylase gene, a lipoxygenase gene, or a collagen alpha gene, such as a collagen alpha 1(I) gene, or on a part thereof as described above. This term includes sequences corresponding to the entire sequence of the variant of the 3′-UTR of a gene, i.e. the full length variant 3′-UTR sequence of a gene, and sequences corresponding to a fragment of the variant 3′-UTR sequence of a gene. A fragment in this context preferably consists of a continuous stretch of nucleotides corresponding to a continuous stretch of nucleotides in the full-length variant 3′-UTR, which represents at least 20%, preferably at least 30%, more preferably at least 40%, more preferably at least 50%, even more preferably at least 60%, even more preferably at least 70%, even more preferably at least 80%, and most preferably at least 90% of the full-length variant 3′-UTR. Such a fragment of a variant, in the sense of the present invention, is preferably a functional fragment of a variant as described herein.

[0686] In some embodiments, the 3′-UTR element may be any 3′-UTR element described in WO2016/107877. In this context, the disclosure of WO2016/107877 relating to 3′-UTR elements/sequences is herewith incorporated by reference. Particularly preferred 3′-UTR elements are SEQ ID NOs: 1 to 24 and SEQ ID NOs: 49 to 318 of the patent application WO2016/107877, or fragments or variants of these sequences. In this context, it is particularly preferred that the 3′-UTR element comprises or consists of a corresponding RNA sequence of the nucleic acid sequence according SEQ ID NOs: 1 to 24 and SEQ ID NOs: 49 to 318 of the patent application WO2016/107877.

[0687] In certain embodiments, the 3′-UTR element may be any 3′-UTR element as described in WO2017/036580. In this context, the disclosure of WO2017/036580 relating to 3′-UTR elements/sequences is herewith incorporated by reference. Particularly preferred 3′-UTR elements are nucleic acid sequences according to SEQ ID NOs: 152 to 204 of the patent application WO2017/036580, or fragments or variants of these sequences. In this context, it is particularly preferred that the 3′-UTR element comprises or consists of a corresponding RNA sequence of the nucleic acid sequence according SEQ ID NOs: 152 to 204 of the patent application WO2017/036580.

[0688] According to one embodiment, the at least one coding RNA as described herein further comprises at least one 3′-UTR element, which comprises or consists of a nucleic acid sequence derived from the 3′-UTR of a gene selected from the group consisting of 40S ribosomal protein S9 (RPS9), Proteasome Subunit Beta 3 (PSMB3), Caspase 1 (CASP1), and Cytochrome c oxidase subunit 6B1 (COX6B1), or a variant of any of these genes, wherein the gene or the variant thereof is preferably a vertebrate gene, more preferably a mammalian gene, and even more preferably a human gene.

[0689] In a particularly preferred embodiment, the 3′-UTR element comprises or consists of a nucleic acid sequence which is derived from a 3′-UTR of a gene selected from the group consisting of an albumin gene, an α-globin gene, a β-globin gene, a tyrosine hydroxylase gene, a lipoxygenase gene, and a collagen alpha gene, such as a collagen alpha 1(I) gene, preferably as described herein, a 40S ribosomal protein S9 gene (RPS9), a Proteasome Subunit Beta 3 gene (PSMB3), a Caspase 1 gene (CASP1), and a Cytochrome c oxidase subunit 6B1 gene (COX6B1), or a variant of any of these genes, wherein the gene or the variant thereof is preferably a vertebrate gene, more preferably a mammalian gene, and even more preferably a human gene.

[0690] In a further preferred embodiment, the 3′-UTR element comprises or consists of a nucleic acid sequence, which has an identity of at least about 40%, preferably of at least about 50%, preferably of at least about 60%, preferably of at least about 70%, more preferably of at least about 80%, more preferably of at least about 90%, even more preferably of at least about 95%, even more preferably of at least about 99% to the nucleic acid sequence according to any one of SEQ ID NO: 852, 854, 856 or 858, or a corresponding RNA sequence, preferably selected from SEQ ID NO: 853, 855, 857 or 859, or wherein the at least one 3′-UTR element comprises or consists of a fragment of a nucleic acid sequence which has an identity of at least about 20%, preferably of at least about 40%, preferably of at least about 50%, preferably of at least about 60%, preferably of at least about 70%, more preferably of at least about 80%, more preferably of at least about 90%, even more preferably of at least about 95%, even more preferably of at least about 99% to the nucleic acid sequence according to any one of SEQ ID NO: 852, 854, 856 or 858, wherein, preferably, the fragment is as described above, i.e. being a continuous stretch of nucleotides representing at least 20% etc. of the full-length 3′-UTR. Preferably, the fragment exhibits a length of at least about 20 nucleotides or more, preferably of at least about 30 nucleotides or more, more preferably of at least about 40 nucleotides or more. Preferably, the fragment is a functional fragment as described herein.

[0691] According to a particularly preferred embodiment, the 3′-UTR element comprises or consists of a nucleic acid sequence, which has an identity of at least about 40%, preferably of at least about 50%, preferably of at least about 60%, preferably of at least about 70%, more preferably of at least about 80%, more preferably of at least about 90%, even more preferably of at least about 95%, even more preferably of at least about 99% to the nucleic acid sequence according to any one of SEQ ID NO: 852, 854, 856, 858, 412, 414, 416, 418, 420, 422 or 424, or a corresponding RNA sequence, or wherein the at least one 3′-UTR element comprises or consists of a fragment of a nucleic acid sequence which has an identity of at least about 20%, preferably of at least about 40%, preferably of at least about 50%, preferably of at least about 60%, preferably of at least about 70%, more preferably of at least about 80%, more preferably of at least about 90%, even more preferably of at least about 95%, even more preferably of at least about 99% to the nucleic acid sequence according to any one of SEQ ID NO: 852, 854, 856, 858, 412, 414, 416, 418, 420, 422 or 424, or, wherein, preferably, the fragment is as described above, i.e. being a continuous stretch of nucleotides representing at least 20% etc. of the full-length 3′-UTR. Preferably, the fragment exhibits a length of at least about 20 nucleotides or more, preferably of at least about 30 nucleotides or more, more preferably of at least about 40 nucleotides or more. Preferably, the fragment is a functional fragment as described herein.

[0692] Preferably, the at least one 5′-UTR element and the at least one 3′-UTR element act synergistically to increase protein production from the at least one coding RNA as described herein.

[0693] In a preferred embodiment, the at least one coding RNA as described herein thus comprises at least one 5′-UTR element, preferably as described herein, and at least one 3′-UTR element, preferably as described herein. Particularly preferred 5′-UTR elements, 3′-UTR elements and the respective combinations thereof are summarized in the following Table A. Therein, the 5′-UTR elements and the 3′-UTR elements are preferably as described herein.

TABLE A
Preferred combinations of 5′-UTR elements and 3′-UTR elements:

| | SEQ ID NO: | SEQ ID NO: | | SEQ ID NO: | SEQ ID NO: |
|---|---|---|---|---|---|
| 5′-UTR element: | RNA | DNA | 3′-UTR element: | RNA | DNA |
| Mp68 | 839 | 838 | RPS9 | 853 | 852 |
| Nosip | 841 | 840 | RPS9 | 853 | 852 |
| HSD17B4 | 843 | 842 | PSMB3 | 855 | 854 |
| Rpl31 | 845 | 844 | CASP1 | 857 | 856 |
| TUBB4B | 847 | 846 | RPS9 | 853 | 852 |
| ATP5A1 | 849 | 848 | PSMB3 | 855 | 854 |
| Ndufa4 | 851 | 850 | RPS9 | 853 | 852 |
| Mp68 | 839 | 838 | COX6B | 859 | 858 |
| Rpl31 | 845 | 844 | PSMB3 | 855 | 854 |
| HSD17B4 | 843 | 842 | COX6B | 859 | 858 |

[0694] According to preferred embodiments, a 5′-UTR element as indicated in column 1 (‘5′-UTR element’) of Table A and as described herein is combined in the at least one coding RNA as used herein with the 3′-UTR element indicated in the same row in column 4 (‘C3-UTR element’) of Table A and as described herein. For example, a 5′-UTR element derived from an Mp68 gene or a variant thereof as described herein may preferably be combined with a 3′-UTR element derived from an RPS9 gene or a variant thereof as described herein. More preferably, a 5′-UTR element comprising an RNA sequence according to the SEQ ID NO: indicated in column 2 (‘SEQ ID NO: RNA’) of Table A or a DNA sequence according to the SEQ ID NO: indicated in column 3 (‘SEQ ID NO: DNA’) of Table A, or a fragment or variant of said RNA or DNA sequence, may be combined with the 3′-UTR element in the same row of Table A, i.e. preferably the 3′-UTR element comprising an RNA sequence according to the SEQ ID NO: indicated in column 5 (‘SEQ ID NO: RNA’) in the same row of Table A or a DNA sequence according to the SEQ ID NO: indicated in column 6 (‘SEQ ID NO: DNA’) in the same row of Table A, or a fragment or variant of said RNA or DNA sequence. For example, the at least one coding RNA as used herein may comprise a 5′-UTR element comprising or consisting of the nucleic acid sequence defined by SEQ ID NO: 841, or a fragment or variant thereof as defined herein, and a 3′-UTR element comprising or consisting of the nucleic acid sequence defined by SEQ ID NO: 853, or a fragment or variant thereof as defined herein. According to another preferred embodiment of the invention, an isRNA or the at least one coding RNA as described herein, can be modified by the addition of a so-called “5′ cap” structure, which preferably stabilizes the RNA as described herein. A 5′-cap is an entity, typically a modified nucleotide entity, which generally “caps” the 5′-end of a mature mRNA. A 5′-cap may typically be formed by a modified nucleotide, particularly by a derivative of a guanine nucleotide. Preferably, the 5′-cap is linked to the 5′-terminus via a 5′-5′-triphosphate linkage. A 5′-cap may be methylated, e.g. m7GpppN, wherein N is the terminal 5′ nucleotide of the nucleic acid carrying the 5′-cap, typically the 5′-end of an mRNA. m7GpppN is the 5′-cap structure, which naturally occurs in mRNA transcribed by polymerase II and is therefore preferably not considered as modification comprised in a modified RNA in this context. Accordingly, a modified RNA of the present invention may comprise a m7GpppN as 5′-cap, but additionally the modified RNA typically comprises at least one further modification as defined herein.

[0695] Further examples of 5′cap structures include glyceryl, inverted deoxy abasic residue (moiety), 4′,5′ methylene nucleotide, 1-(beta-D-erythrofuranosyl) nucleotide, 4′-thio nucleotide, carbocyclic nucleotide, 1,5-anhydrohexitol nucleotide, L-nucleotides, alpha-nucleotide, modified base nucleotide, threo-pentofuranosyl nucleotide, acyclic 3′,4′-seco nucleotide, acyclic 3,4-dihydroxybutyl nucleotide, acyclic 3,5 dihydroxypentyl nucleotide, 3′-3′-inverted nucleotide moiety, 3′-3′-inverted abasic moiety, 3′-2′-inverted nucleotide moiety, 3′-2′-inverted abasic moiety, 1,4-butanediol phosphate, 3′-phosphoramidate, hexylphosphate, aminohexyl phosphate, 3′-phosphate, 3′phosphorothioate, phosphorodithioate, or bridging or non-bridging methylphosphonate moiety. These modified 5′-cap structures are regarded as at least one modification in this context.

[0696] Particularly preferred modified 5′-cap structures are cap1 (methylation of the ribose of the adjacent nucleotide of m7G), cap2 (additional methylation of the ribose of the 2nd nucleotide downstream of the m7G), cap3 (additional methylation of the ribose of the 3rd nucleotide downstream of the m7G), cap4 (methylation of the ribose of the 4th nucleotide downstream of the m7G), ARCA (anti-reverse cap analogue, modified ARCA (e.g. phosphothioate modified ARCA), inosine, N1-methyl-guanosine, 2′-fluoro-guanosine, 7-deaza-guanosine, 8-oxo-guanosine, 2-amino-guanosine, LNA-guanosine, and 2-azido-guanosine.

[0697] In some embodiments, the at least one coding RNA as described herein preferably comprises a poly(A) and/or a poly(C) sequence.

[0698] In a particularly preferred embodiment, the at least one coding RNA as described herein comprises additionally to the coding region encoding at least one peptide or protein as described above or a fragment or variant thereof, a poly(A) sequence, also called poly-A tail, preferably at the 3′ terminus of the RNA. If present, such a poly(A) sequence comprises a sequence of about 25 to about 400 adenosine nucleotides, preferably a sequence of about 50 to about 400 adenosine nucleotides, more preferably a sequence of about 50 to about 300 adenosine nucleotides, even more preferably a sequence of about 50 to about 250 adenosine nucleotides, most preferably a sequence of about 60 to about 250 adenosine nucleotides. In this context the term “about” refers to a deviation of +10% of the value(s) it is attached to. This poly(A) sequence is preferably located 3′ of the coding region comprised in the at least one coding RNA as described herein.

[0699] Preferably, the poly(A) sequence in at least one coding RNA as described herein is derived from a DNA template by RNA in vitro transcription. Alternatively, the poly(A) sequence may also be obtained in vitro by common methods of chemical-synthesis without being necessarily transcribed from a DNA-progenitor. Moreover, poly(A) sequences, or poly(A) tails may be generated by enzymatic polyadenylation of the at least one RNA using commercially available polyadenylation kits and corresponding protocols known in the art.

[0700] Alternatively, the at least one coding RNA as described herein optionally comprises a polyadenylation signal, which is defined herein as a signal, which conveys polyadenylation to a (transcribed) RNA by specific protein factors (e.g. cleavage and polyadenylation specificity factor (CPSF), cleavage stimulation factor (CstF), cleavage factors I and II (CF I and CF II), poly(A) polymerase (PAP)). In this context, a consensus polyadenylation signal is preferred comprising the NN(U/T)ANA consensus sequence. In a particularly preferred aspect, the polyadenylation signal comprises one of the following sequences: AA(U/T)AAA or A(U/T)(U/T)AAA (wherein uridine is usually present in RNA and thymidine is usually present in DNA).

[0701] According to a further preferred embodiment, the at leasat one coding RNA as described herein can be modified by a sequence of at least 10 cytosines, preferably at least 20 cytosines, more preferably at least 30 cytosines (so-called “poly(C) sequence”). Particularly, the RNA may contain a poly(C) sequence of typically about 10 to 200 cytosine nucleotides, preferably about 10 to 100 cytosine nucleotides, more preferably about 10 to 70 cytosine nucleotides or even more preferably about 20 to 50 or even 20 to 30 cytosine nucleotides. This poly(C) sequence is preferably located 3′ of the coding region, more preferably 3′ of an optional poly(A) sequence comprised in the at least one coding RNA as described herein.

[0702] In a particularly preferred embodiment, the at least one coding RNA as described herein comprises a histone stem-loop sequence/structure. Such histone stem-loop sequences are preferably selected from histone stem-loop sequences as disclosed in WO 2012/019780, whose disclosure is incorporated herewith by reference.

[0703] A histone stem-loop sequence, suitable to be used within the present invention, is preferably selected from at least one of the following formulae (VII) or (VIII):

[0704] formula (VII) (stem-loop sequence without stem bordering elements):

[chemical structure]

[0705] formula (VIII) (stem-loop sequence with stem bordering elements):

[chemical structure]

[0706] wherein:
[0707] stem1 or stem2 bordering elements N1-6 is a consecutive sequence of 1 to 6, preferably of 2 to 6, more preferably of 2 to 5, even more preferably of 3 to 5, most preferably of 4 to 5 or 5 N, wherein each N is independently from another selected from a nucleotide selected from A, U, T, G and C, or a nucleotide analogue thereof;
[0708] stem1 [N₀₋₂GN₃₋₅] is reverse complementary or partially reverse complementary with element stem2, and is a consecutive sequence between of 5 to 7 nucleotides;
   [0709] wherein N₀₋₂ is a consecutive sequence of 0 to 2, preferably of 0 to 1, more preferably of 1 N, wherein each N is independently from another selected from a nucleotide selected from A, U, T, G and C or a nucleotide analogue thereof;
   [0710] wherein N₃₋₅ is a consecutive sequence of 3 to 5, preferably of 4 to 5, more preferably of 4 N, wherein each N is independently from another selected from a nucleotide selected from A, U, T, G and C or a nucleotide analogue thereof, and
   [0711] wherein G is guanosine or an analogue thereof, and may be optionally replaced by a cytidine or an analogue thereof, provided that its complementary nucleotide cytidine in stem2 is replaced by guanosine;
[0712] loop sequence [N₀₋₄(U/T)N₀₋₄] is located between elements stem1 and stem2, and is a consecutive sequence of 3 to 5 nucleotides, more preferably of 4 nucleotides;
   [0713] wherein each N₀₋₄ is independent from another a consecutive sequence of 0 to 4, preferably of 1 to 3, more preferably of 1 to 2 N, wherein each N is independently from another selected from a nucleotide selected from A, U, T, G and C or a nucleotide analogue thereof; and
   [0714] wherein U/T represents uridine, or optionally thymidine;
[0715] stem2 [N₃₋₅CN₀₋₂] is reverse complementary or partially reverse complementary with element stem1, and is a consecutive sequence between of 5 to 7 nucleotides;
   [0716] wherein N₃₋₅ is a consecutive sequence of 3 to 5, preferably of 4 to 5, more preferably of 4 N, wherein each N is independently from another selected from a nucleotide selected from A, U, T, G and C or a nucleotide analogue thereof;
   [0717] wherein N₀₋₂ is a consecutive sequence of 0 to 2, preferably of 0 to 1, more preferably of 1 N, wherein each N is independently from another selected from a nucleotide selected from A, U, T, G or C or a nucleotide analogue thereof; and
   [0718] wherein C is cytidine or an analogue thereof, and may be optionally replaced by a guanosine or an analogue thereof provided that its complementary nucleoside guanosine in stem1 is replaced by cytidine;

[0719] wherein

[0720] stem1 and stem2 are capable of base pairing with each other forming a reverse complementary sequence, wherein base pairing may occur between stem1 and stem2, e.g. by Watson-Crick base pairing of nucleotides A and U/T or G and C or by non-Watson-Crick base pairing e.g. wobble base pairing, reverse Watson-Crick base pairing, Hoogsteen base pairing, reverse Hoogsteen base pairing or are capable of base pairing with each other forming a partially reverse complementary sequence, wherein an incomplete base pairing may occur between stem1 and stem2, on the basis that one ore more bases in one stem do not have a complementary base in the reverse complementary sequence of the other stem.

[0721] According to a further preferred embodiment of the first inventive aspect, the at least one mRNA of the inventive composition sequence may comprise at least one histone stem-loop sequence according to at least one of the following specific formulae (Vila) or (Villa):

[0722] formula (Vila) (stem-loop sequence without stem bordering elements):

[chemical structure]

[0723] formula (Villa) (stem-loop sequence with stem bordering elements):

[chemical structure]

[0724] wherein:

[0725] N, C, G, T and U are as defined above.

[0726] According to a further more particularly preferred embodiment of the first aspect, the at least one mRNA of the inventive composition sequence may comprise at least one histone stem-loop sequence according to at least one of the following specific formulae (VIIb) or (VIIIb):

[0727] formula (VIIb) (stem-loop sequence without stem bordering elements):

[chemical structure]

[0728] formula (VIIIb) (stem-loop sequence with stem bordering elements):

[chemical structure]

[0729] wherein:

[0730] N, C, G, T and U are as defined above.

[0731] A particular preferred histone stem-loop sequence is the sequence according to SEQ ID No: 426.

[0732] More preferably the stem-loop sequence is the corresponding RNA sequence of the nucleic acid sequence according to SEQ ID NO: 427.

[0733] According to another particularly preferred embodiment, the at least one coding RNA as described herein may additionally or alternatively encode a secretory signal peptide. Such signal peptides are sequences, which typically exhibit a length of about 15 to 30 amino acids and are preferably located at the N-terminus of the encoded peptide, without being limited thereto. Signal peptides as defined herein preferably allow the transport of the antigen, antigenic protein or antigenic peptide as encoded by the at least one coding RNA as described herein into a defined cellular compartiment, preferably the cell surface, the endoplasmic reticulum (ER) or the endosomal-lysosomal compartiment. Examples of secretory signal peptide sequences as defined herein include, without being limited thereto, signal sequences of classical or non-classical MHC-molecules (e.g. signal sequences of MHC I and II molecules, e.g. of the MHC class I molecule HLA-A*0201), signal sequences of cytokines or immunoglobulines as defined herein, signal sequences of the invariant chain of immunoglobulines or antibodies as defined herein, signal sequences of Lamp1, Tapasin, Erp57, Calretikulin, Calnexin, and further membrane associated proteins or of proteins associated with the endoplasmic reticulum (ER) or the endosomal-lysosomal compartiment. Particularly preferably, signal sequences of MHC class I molecule HLA-A*0201 may be used according to the present invention.

[0734] In some embodiments, the at least one coding RNA as described herein, preferably an mRNA, comprises, preferably in 5′ to 3′ direction, the following elements:
[0735] a) a 5′-CAP structure, preferably m7GpppN,
[0736] b) at least one coding sequence encoding at least one peptide or protein comprising IL-12, a decoy PD-1 receptor, preferably a soluble PD-1 receptor as described herein, CD40L, an anti-CTLA4 antibody, and/or a tumor antigen or a fragment or variant of any of these proteins,
[0737] c) a 3′-UTR element comprising a nucleic acid sequence, which is derived from an α-globin gene, preferably comprising the corresponding RNA sequence of the nucleic acid sequence according to SEQ ID NO: 418, or a homolog, a fragment or a variant thereof,
[0738] d) a poly(A) tail, preferably consisting of 10 to 200, 10 to 100, 40 to 80 or 50 to 70 adenosine nucleotides,
[0739] e) a poly(C) tail, preferably consisting of 10 to 200, 10 to 100, 20 to 70, 20 to 60 or 10 to 40 cytosine nucleotides, and
[0740] f) a histone stem-loop, preferably comprising the RNA sequence according to SEQ ID NO: 427.

[0741] According to a preferred embodiment, the at least one coding RNA as described herein comprises
[0742] a) a nucleic acid sequence selected from the group consisting of SEQ ID NOs: 146-151; 157-162; 168-173; 179-184; 190-195; 201-206; 212-217; 223-228; 234-239; 245-250; 256-261 and 267-272, or a fragment or variant of any of these sequences, preferably from the group consisting of SEQ ID NOs: 153; 164; 175; 186; 197; 208; 219; 230; 241; 252; 263, 274; 992 and 598, or a fragment or variant of any of these sequences,
[0743] b) a nucleic acid sequence selected from the group consisting of SEQ ID NOs: 154; 165; 176; 187; 198; 209; 220; 231; 242; 253; 264, 275 and 596, or a fragment or variant of any of these sequences,
[0744] c) a nucleic acid sequence according to any one of SEQ ID NO: 860-874, 875-889 or 594, preferably according to SEQ ID NO: 594, or a fragment or variant of any of these nucleic acid sequences, and a nucleic acid sequence according to any one of SEQ ID NO: 890-904, 905-919 or 595, preferably according to SEQ ID NO: 595, or a fragment or variant of any of these nucleic acid sequences;
   [0745] or
   [0746] a nucleic acid sequence according to SEQ ID NO: 920-922 or 923-925, or a fragment or variant of any of these nucleic acid sequences, and/or
[0747] d) optionally, a nucleic acid sequence selected from the group consisting of SEQ ID NOs: 144; 155; 166; 177; 188; 199; 210; 221; 232; 243; 254 and 265 or a fragment or variant of any of these sequences, preferably from the group consisting of SEQ ID NOs: 145; 156; 167; 178; 189; 200; 211; 222; 233; 244; 255; 266 and 597, or a fragment or variant of any of these sequences.

[0748] According to a further embodiment, the at least one coding RNA as described herein comprises
[0749] a) a nucleic acid sequence selected from the group consisting of SEQ ID NOs: 146-151; 451-456; 157-162; 168-173; 179-184; 190-195; 201-206; 212-217; 223-228; 234-239; 245-250; 256-261 and 267 272, or a fragment or variant of any of these sequences, preferably from the group consisting of SEQ ID NOs: 153; 458; 164; 175; 186; 197; 208; 219; 230; 241; 252; 263, 274; 992 and 598, or a fragment or variant of any of these sequences,
[0750] b) a nucleic acid sequence selected from the group consisting of SEQ ID NOs: 154; 459; 165; 176; 187; 198; 209; 220; 231; 242; 253; 264, 275 and 596, or a fragment or variant of any of these sequences,
[0751] c) a nucleic acid sequence according to any one of SEQ ID NO: 860-874, 875-889 or 594, preferably according to SEQ ID NO: 594, or a fragment or variant of any of these nucleic acid sequences, and a nucleic acid sequence according to any one of SEQ ID NO: 890-904, 905-919 or 595, preferably according to SEQ ID NO: 595, or a fragment or variant of any of these nucleic acid sequences;
   [0752] or
   [0753] a nucleic acid sequence according to SEQ ID NO: 920-922 or 923-925, or a fragment or variant of any of these nucleic acid sequences, and/or
[0754] d) optionally, a nucleic acid sequence selected from the group consisting of SEQ ID NOs: 144; 449; 155; 166; 177; 188; 199; 210; 221; 232; 243; 254 and 265, or a fragment or variant of any of these sequences, preferably from the group consisting of SEQ ID NOs: 145; 450; 156; 167; 178; 189; 200; 211; 222; 233; 244; 255; 266 and 597, or a fragment or variant of any of these sequences.

[0755] In a preferred embodiment, the at least one coding RNA as described herein comprises
[0756] a) a nucleic acid sequence selected from the group consisting of SEQ ID NOs: 451-456; 157-162; 168-173; 179-184; 190-195; 201-206; 212-217; 223-228; 234-239; 245-250; 256-261 and 267-272, or a fragment or variant of any of these sequences, preferably from the group consisting of SEQ ID NOs: 164; 175; 186; 197; 208; 219; 230; 241; 252; 263, 274; 992 and 598, or a fragment or variant of any of these sequences,
[0757] b) a nucleic acid sequence selected from the group consisting of SEQ ID NOs: 459; 165; 176; 187; 198; 209; 220; 231; 242; 253; 264, 275 and 596, or a fragment or variant of any of these sequences,
[0758] c) a nucleic acid sequence according to any one of SEQ ID NO: 860-874, 875-889 or 594, preferably according to SEQ ID NO: 594, or a fragment or variant of any of these nucleic acid sequences, and a nucleic acid sequence according to any one of SEQ ID NO: 890-904, 905-919 or 595, preferably according to SEQ ID NO: 595, or a fragment or variant of any of these nucleic acid sequences;
   [0759] or
   [0760] a nucleic acid sequence according to SEQ ID NO: 920-922 or 923-925, or a fragment or variant of any of these nucleic acid sequences, and/or
[0761] d) optionally, a nucleic acid sequence selected from the group consisting of SEQ ID NOs: 144; 449; 166; 177; 188; 199; 210; 221; 232; 243; 254 and 265, or a fragment or variant of any of these sequences, preferably from the group consisting of SEQ ID NOs: 145; 450; 167; 178; 189; 200; 211; 222; 233; 244; 255; 266 and 597, or a fragment or variant of any of these sequences.

[0762] According to a particularly preferred embodiment, the present invention provides an isRNA for use in the treatment of a tumor or cancer disease as described herein, preferably comprising intratumoral administration of the isRNA, wherein the treatment comprises administration of at least three, preferably at least four or five, coding RNAs as described herein (as additional pharmaceutically active ingredients), preferably at least three, more preferably at least four or five, mRNAs, wherein a first coding RNA comprises a nucleic acid sequence selected from the group consisting of SEQ ID NOs: 153; 164;

[0763] 175; 186; 197; 208; 219; 230; 241; 252; 263; 274; 992 and 598, or a fragment or variant of any of these sequences, a second coding RNA comprises a nucleic acid sequence selected from the group consisting of SEQ ID NOs: 154; 165; 176; 187; 198; 209; 220; 231; 242; 253; 264; 275 and 596, or a fragment or variant of any of these sequences, a third coding RNA comprises a nucleic acid sequence selected from the group consisting of a nucleic acid sequence according to any one of SEQ ID NO: 860-874 or 594, preferably according to SEQ ID NO: 594, or a fragment or variant of any of these nucleic acid sequences, and a nucleic acid sequence according to any one of SEQ ID NO: 890-904 or 595, preferably according to SEQ ID NO: 595, or a fragment or variant of any of these nucleic acid sequences, and/or optionally, a fourth coding RNA comprises a nucleic acid sequence selected from the group consisting of SEQ ID NOs: 145; 156; 167; 178; 189; 200; 211; 222; 233; 244; 255; 266 and 597, or a fragment or variant of any of these sequences,

[0764] wherein the first, the second, the third and the fourth coding RNAs are preferably administered intratumorally.

[0765] According to a particularly preferred embodiment, the present invention provides an isRNA for use in the treatment of a tumor or cancer disease as described herein, preferably comprising intratumoral administration of the isRNA, wherein the treatment comprises administration of at least three, preferably at least four or five, coding RNAs as described herein (as additional pharmaceutically active ingredients), preferably at least three, more preferably at least four or five, mRNAs, wherein
[0766] a) a first coding RNA comprises a nucleic acid sequence selected from the group consisting of SEQ ID NOs: 153; 164; 175; 186; 197; 208; 219; 230; 241; 252; 263; 274; 992 and 598, or a fragment or variant of any of these sequences,
[0767] b) a second coding RNA comprises a nucleic acid sequence selected from the group consisting of SEQ ID NOs: 154; 165; 176; 187; 198; 209; 220; 231; 242; 253; 264; 275 and 596, or a fragment or variant of any of these sequences,
[0768] c) a third coding RNA comprises a nucleic acid sequence selected from the group consisting of a nucleic acid sequence according to any one of SEQ ID NO: 860-874 or 594, preferably according to SEQ ID NO: 594, or
   [0769] a fragment or variant of any of these nucleic acid sequences, and
   [0770] a fourth coding RNA comprises a nucleic acid sequence according to any one of SEQ ID NO: 890-904 or 595, preferably according to SEQ ID NO: 595, or a fragment or variant of any of these nucleic acid sequences, and/or
[0771] d) optionally, a fifth coding RNA comprises a nucleic acid sequence selected from the group consisting of SEQ ID NOs: 145; 156; 167; 178; 189; 200; 211; 222; 233; 244; 255; 266 and 597, or a fragment or variant of any of these sequences

[0772] wherein the first, the second, the third, the fourth and the fifth coding RNAs are preferably administered intratumorally.

[0773] In a particularly preferred embodiment, the present invention provides an isRNA for use in the treatment of a tumor or cancer disease as described herein, preferably comprising intratumoral administration of the isRNA, wherein the treatment comprises administration of at least three, preferably at least four of five, coding RNAs as described herein (as additional pharmaceutically active ingredients), preferably at least three, more preferably at least four or five, mRNAs, wherein
[0774] a) a first coding RNA comprises a nucleic acid sequence selected from the group consisting SEQ ID NOs: 164; 175; 186; 197; 208; 219; 230; 241; 252; 263; 274; 992 and 598, or a fragment or variant of any of these sequences,
[0775] b) a second coding RNA comprises a nucleic acid sequence selected from the group consisting of SEQ ID NOs: 165; 176; 187; 198; 209; 220; 231; 242; 253; 264; 275 and 596, or a fragment or variant of any of these sequences,
[0776] c) a third coding RNA comprises a nucleic acid sequence selected from the group consisting of a nucleic acid sequence according to any one of SEQ ID NO: 860-874 or 594, preferably according to SEQ ID NO: 594, or
   [0777] a fragment or variant of any of these nucleic acid sequences, and
   [0778] a fourth coding RNA comprises a nucleic acid sequence according to any one of SEQ ID NO: 890-904 or 595, preferably according to SEQ ID NO: 595, or a fragment or variant of any of these nucleic acid sequences, and/or
[0779] d) optionally, a fifth coding RNA comprises a nucleic acid sequence selected from the group consisting of SEQ ID NOs: 156; 167; 178; 189; 200; 211; 222; 233; 244; 255; 266 and 597, or a fragment or variant of any of these sequences,

[0780] wherein the first, the second, the third, the fourth and the fifth coding RNAs are preferably administered intratumorally.

[0781] In certain embodiments, the at least one coding RNA as described herein, preferably an mRNA, comprises, preferably in 5′ to 3′ direction, the following elements:
[0782] a) a 5′-CAP structure, preferably m7GpppN,
[0783] b) a 5′-UTR element, which comprises or consists of a nucleic acid sequence, which is derived from the 5′-UTR of a TOP gene, preferably comprising an RNA sequence corresponding to the nucleic acid sequence according to SEQ ID NO: 408, or a homolog, a fragment or a variant thereof,
[0784] c) at least one coding sequence encoding at least one peptide or protein comprising IL-12, a decoy PD-1 receptor, preferably a soluble PD-1 receptor as described herein, CD40L, an anti-CTLA4 antibody, and/or a tumor antigen or a fragment or variant of any of these proteins,
[0785] d) a 3′-UTR element comprising a nucleic acid sequence, which is derived from an α-globin gene, preferably comprising the corresponding RNA sequence of the nucleic acid sequence according to SEQ ID NO: 418, or a homolog, a fragment or a variant thereof; and/or
   [0786] a 3′-UTR element comprising a nucleic acid sequence, which is derived from an albumin gene, preferably comprising the corresponding RNA sequence of the nucleic acid sequence according to SEQ ID NO: 422 or 424, or a homolog, a fragment or a variant of any of these sequences,
[0787] e) a poly(A) tail, preferably consisting of 10 to 200, 10 to 100, 40 to 80 or 50 to 70 adenosine nucleotides,
[0788] f) a poly(C) tail, preferably consisting of 10 to 200, 10 to 100, 20 to 70, 20 to 60 or 10 to 40 cytosine nucleotides, and
[0789] g) a histone stem-loop, preferably comprising the RNA sequence according to SEQ ID NO: 427.

[0790] According to a preferred embodiment, the at least one coding RNA as described herein comprises
[0791] a) a nucleic acid sequence selected from the group consisting of SEQ ID NOs: 278-283; 289-294; 300-305; 311-316; 322-327; 333-338; 344-349; 355-360; 366-371; 377-382; 388-393; 399-404 and 462-467, or a fragment or variant of any of these sequences, preferably from the group consisting of SEQ ID NOs: 285; 296; 307; 318; 329; 340; 351; 362; 373; 384; 395; 406; 430; 469 and 992, or a fragment or variant of any of these sequences,
[0792] b) a nucleic acid sequence selected from the group consisting of SEQ ID NO: 286; 297; 308; 319; 330; 341; 352; 363; 374; 385; 396; 470 and 407, or a fragment or variant of any of these sequences,
[0793] c) a nucleic acid sequence according to any one of SEQ ID NO: 926-940 or 941-955, preferably according to SEQ ID NO: 926-940, or a fragment or variant of any of these nucleic acid sequences, and a nucleic acid sequence according to any one of SEQ ID NO: 956-970 or 971-985, preferably according to SEQ ID NO: 956-970, or a fragment or variant of any of these nucleic acid sequences;
   [0794] or
   [0795] a nucleic acid sequence according to SEQ ID NO: 986-988 or 989-991, or a fragment or variant of any of these nucleic acid sequences, and/or
[0796] d) optionally, a nucleic acid sequence selected from the group consisting of SEQ ID NOs: 276; 287; 298; 309; 320; 331; 342; 353; 364; 375; 386; 460 and 397, or a fragment or variant of any of these sequences, preferably from the group consisting of SEQ ID NOs: 277; 288; 299; 310; 321; 332; 343; 354; 365; 376; 461; 387 and 398, or a fragment or variant of any of these sequences.

[0797] According to another embodiment, the at least one coding RNA as described herein comprises
[0798] a) a nucleic acid sequence selected from the group consisting of SEQ ID NOs: 289-294; 300-305; 311-316; 322-327; 333-338; 344-349; 355-360; 366-371; 377-382; 388-393 and 399-404, or a fragment or variant of any of these sequences,
[0799] b) a nucleic acid sequence selected from the group consisting of SEQ ID NO: 286; 297; 308; 319; 330; 341; 352; 363; 374; 385; 396 and 407, or a fragment or variant of any of these sequences,
[0800] c) a nucleic acid sequence according to any one of SEQ ID NO: 926-940 or 941-955, preferably according to SEQ ID NO: 926-940, or a fragment or variant of any of these nucleic acid sequences, and a nucleic acid sequence according to any one of SEQ ID NO: 956-970 or 971-985, preferably according to SEQ ID NO: 956-970, or a fragment or variant of any of these nucleic acid sequences;
   [0801] or
   [0802] a nucleic acid sequence according to SEQ ID NO: 986-988 or 989-991, or a fragment or variant of any of these nucleic acid sequences, and/or
[0803] d) optionally, a nucleic acid sequence selected from the group consisting of SEQ ID NOs: 296; 307; 318; 329; 340; 351; 362; 373; 384; 395; 406; 430 and 992, or a fragment or variant of any of these sequences, preferably from the group consisting of SEQ ID NOs: 277; 288; 299; 310; 321; 332; 343; 354; 365; 376; 387 and 398, or a fragment or variant of any of these sequences.

[0804] In a preferred embodiment, the at least one coding RNA as described herein comprises
[0805] a) a nucleic acid sequence selected from the group consisting of SEQ ID NOs: 278-283; 289-294; 300-305; 311-316; 322-327; 333-338; 344-349; 355-360; 366-371; 377-382; 388-393; 399-404 and 462-467, or a fragment or variant of any of these sequences, preferably from the group consisting of SEQ ID NOs: 285; 296; 307; 318; 329; 340; 351; 362; 373; 384; 395; 406; 430; 469 and 992, or a fragment or variant of any of these sequences,
[0806] b) a nucleic acid sequence selected from the group consisting of SEQ ID NO: 286; 297; 308; 319; 330; 341; 352; 363; 374; 385; 396 and 407, or a fragment or variant of any of these sequences,
[0807] c) a nucleic acid sequence according to any one of SEQ ID NO: 926-940 or 941-955, preferably according to SEQ ID NO: 926-940, or a fragment or variant of any of these nucleic acid sequences, and a nucleic acid sequence according to any one of SEQ ID NO: 956-970 or 971-985, preferably according to SEQ ID NO: 956-970, or a fragment or variant of any of these nucleic acid sequences;
   [0808] or
   [0809] a nucleic acid sequence according to SEQ ID NO: 986-988 or 989-991, or a fragment or variant of any of these nucleic acid sequences, and/or
[0810] d) optionally, a nucleic acid sequence selected from the group consisting of SEQ ID NOs: 276; 287; 298; 309; 320; 331; 342; 353; 364; 375; 386; 460 and 397, or a fragment or variant of any of these sequences, preferably from the group consisting of SEQ ID NOs: 277; 288; 299; 310; 321; 332; 343; 354; 365; 376; 461; 387 and 398, or a fragment or variant of any of these sequences.

[0811] According to a particularly preferred embodiment, the present invention provides an isRNA for use in the treatment of a tumor or cancer disease as described herein, preferably comprising intratumoral administration of the isRNA, wherein the treatment comprises administration of at least three, preferably at least four or five, coding RNAs as described herein (as additional pharmaceutically active ingredients), preferably at least three, more preferably at least four or five, mRNAs, wherein
[0812] a) a first coding RNA comprises a nucleic acid sequence selected from the group consisting of SEQ ID NOs: 285; 296; 307; 318; 329; 340; 351; 362; 373; 384; 395; 406; 430; 469 and 992, or a fragment or variant of any of these sequences,
[0813] b) a second coding RNA comprises a nucleic acid sequence selected from the group consisting of SEQ ID NOs: 286; 297; 308; 319; 330; 341; 352; 363; 374; 385; 396; 470 and 407, or a fragment or variant of any of these sequences,
[0814] c) a third coding RNA comprises a nucleic acid sequence selected from the group consisting of a nucleic acid sequence according to any one of SEQ ID NO: 926-940, or a fragment or variant of any of these nucleic acid sequences, and
   [0815] a fourth coding RNA comprises a nucleic acid sequence according to any one of SEQ ID NO: 956-970, or a fragment or variant of any of these nucleic acid sequences, and/or
[0816] d) optionally, a fifth coding RNA comprises a nucleic acid sequence selected from the group consisting of SEQ ID NOs: 277; 288; 299; 310; 321; 332; 343; 354; 365; 376; 387; 461 and 398, or a fragment or variant of any of these sequences;

[0817] wherein the first, the second, the third, the fourth and the fifth coding RNAs are preferably administered intratumorally.

[0818] In a further preferred embodiment, the present invention provides an isRNA for use in the treatment of a tumor or cancer disease as described herein, preferably comprising intratumoral administration of the isRNA, wherein the treatment comprises administration of at least three, preferably at least four or five, coding RNAs as described herein (as additional pharmaceutically active ingredients), preferably at least three, more preferably at least four or five, mRNAs, wherein
[0819] a) a first coding RNA comprises a nucleic acid sequence selected from the group consisting of SEQ ID NOs: 285; 296; 307; 318; 329; 340; 351; 362; 373; 384; 395; 406; 430; 469 and 992, or a fragment or variant of any of these sequences,
[0820] b) a second coding RNA comprises a nucleic acid sequence selected from the group consisting of SEQ ID NOs: 286; 297; 308; 319; 330; 341; 352; 363; 374; 385; 396; 470 and 407, or a fragment or variant of any of these sequences,
[0821] c) a third coding RNA comprises a nucleic acid sequence selected from the group consisting of a nucleic acid sequence according to any one of SEQ ID NO: 926-940, or a fragment or variant of any of these nucleic acid sequences, and
   [0822] a fourth coding RNA comprises a nucleic acid sequence according to any one of SEQ ID NO: 956-970, or a fragment or variant of any of these nucleic acid sequences, and/or
[0823] d) optionally a fifth coding RNA comprises a nucleic acid sequence selected from the group consisting of SEQ ID NOs: 277; 288; 299; 310; 321; 332; 343; 354; 365; 376; 387; 461 and 398, or a fragment or variant of any of these sequences,

[0824] wherein the first, the second, the third, the fourth and the fifth coding RNAs are preferably administered intratumorally.

[0825] According to a particularly preferred embodiment, the present invention provides an isRNA for use in the treatment of a tumor or cancer disease as described herein, preferably comprising intratumoral administration of the isRNA, wherein the treatment comprises administration of at least three, preferably at least four or five, coding RNAs as described herein (as additional pharmaceutically active ingredients), preferably at least three, more preferably at least four or five, mRNAs, wherein
[0826] a) a first coding RNA comprises a nucleic acid sequence selected from the group consisting of SEQ ID NOs: 285; 296; 307; 318; 329; 340; 351; 362; 373; 384; 395; 406; 430; 469 and 992, or a fragment or variant of any of these sequences,
[0827] b) a second coding RNA comprises a nucleic acid sequence selected from the group consisting of SEQ ID NOs: 286; 297; 308; 319; 330; 341; 352; 363; 374; 385; 396; 470 and 407, or a fragment or variant of any of these sequences,
[0828] c) a third coding RNA comprises a nucleic acid sequence selected from the group consisting of a nucleic acid sequence according to any one of SEQ ID NO: 926-940, or a fragment or variant of any of these nucleic acid sequences, and
   [0829] a fourth coding RNA comprises a nucleic acid sequence according to any one of SEQ ID NO: 956-970, or a fragment or variant of any of these nucleic acid sequences, and/or
[0830] b) optionally, a fifth coding RNA comprises a nucleic acid sequence selected from the group consisting of SEQ ID NOs: 277; 288; 299; 310; 321; 332; 343; 354; 365; 376; 387; 461 and 398, or a fragment or variant of any of these sequences;

[0831] wherein the first, the second, the third, the fourth and the fifth coding RNAs are preferably administered intratumorally.

[0832] According to a preferred embodiment, the present invention relates to an isRNA for use in the treatment of a tumor or cancer disease as described herein, wherein the treatment comprises administration at least one coding RNA as described herein (as additional pharmaceutically active ingredient), wherein the isRNA is administered as RNA complexed with one or more cationic or polycationic compounds, preferably a polymeric carrier as described herein, and the at least one coding RNA, more preferably an mRNA, is administered as free RNA.

[0833] According to a further preferred embodiment, the invention provides an isRNA for use in the treatment of a tumor or cancer disease,

[0834] wherein the isRNA comprises a nucleic acid sequence according to formula (I) (GₗXₘGₙ), formula (II) (CₗXₘCₙ), formula (III) (NᵤGₗXₘGₙNᵥ)ₐ or formula (IV) (NᵤCₗXₘCₙNᵥ)ₐ, preferably at least one nucleic acid sequence according to any one of SEQ ID NOs: 433 to 437, 1014 to 1016, 1055 or 1056, or a fragment or variant of any of these sequences, more preferably according to any one of SEQ ID NOs: 433, 434, 1014 to 1016, or a fragment or a variant thereof,

[0835] wherein the isRNA is complexed with a cationic or polycationic compound, preferably with a polymeric carrier, more preferably with a polymeric carrier that is formed by a disulfide-crosslinked cationic component, which preferably comprises a peptide according to formula (V), (Va) and/or (Vb) and/or a compound according to formula (VI), more preferably at least one of the disulfide-crosslinked cationic peptides Cys-Arg₁₂ (SEQ ID NO: 580), Cys-Arg₁₂-Cys (SEQ ID NO: 579), or Trp-Arg₁₂-Cys (SEQ ID NO: 1074),

[0836] wherein the isRNA is preferably administered intratumorally,

[0837] wherein the tumor or cancer disease is preferably selected from the group consisting of
[0838] melanoma, preferably advanced and/or metastatic melanoma, more preferably advanced cutaneous melanoma (cMEL);
[0839] squamous cell cancer (SCC) of the skin, preferably unresectable and/or advanced SCC of the skin, more preferably cutaneous squamous cell carcinoma (cSCC), even more preferably unresectable and/or advanced cSCC;
[0840] squamous cell carcinoma of the head and neck (HNSCC), preferably advanced HNSCC, more preferably immunotherapy-refractory or platinum-refractory HNSCC, even more preferably immunotherapy-refractory advanced HNSCC or platinum-refractory advanced HNSCC;
[0841] adenocystic carcinoma (ACC), preferably advanced ACC;
[0842] cutaneous T-cell lymphoma, preferably advanced cutaneous T-cell lymphoma or cutaneous T-cell lymphoma of mycosis fungoides subtype, more preferably cutaneous T-cell lymphoma refractory to local treatment or to chemotherapy, even more preferably advanced cutaneous T-cell lymphoma refractory to local treatment or to chemotherapy, or cutaneous T-cell lymphoma of mycosis fungoides subtype refractory to local treatment or to chemotherapy, and
[0843] vulvar cancer, preferably vulvar squamous cell cancer (VSCC), more preferably advanced VSCC, even more preferably VSCC refractory to surgery or chemotherapy, most preferably advanced VSCC refractory to surgery or chemotherapy; or

[0844] selected from the group consisting of cutaneous melanoma (cMEL), cutaneous squamous cell carcinoma (cSCC), head and neck squamous cell carcinoma (HNSCC), adenoid cystic carcinoma (ACC), cutaneous T-cell lymphoma, preferably cutaneous T-cell lymphoma of mycosis fungoides subtype, and vulvar squamous cell cancer (VSCC);

[0845] wherein the tumor or the cancer disease is preferably at an advanced stage and/or refractory to standard therapy;

[0846] wherein the treatment of a tumor or cancer disease comprises administration of at least three, preferably at least four or five, coding RNAs as described herein (as additional pharmaceutically active ingredients), preferably at least three, more preferably at least four or five, mRNAs, wherein
[0847] a) a first coding RNA comprises a nucleic acid sequence selected from the group consisting of of SEQ ID NOs: 285; 296; 307; 318; 329; 340; 351; 362; 373; 384; 395; 406; 430; 469 and 992, or a fragment or variant of any of these sequences,
[0848] b) a second coding RNA comprises a nucleic acid sequence selected from the group consisting of SEQ ID NOs: 286; 297; 308; 319; 330; 341; 352; 363; 374; 385; 396; 470 and 407, or a fragment or variant of any of these sequences,
[0849] c) a third coding RNA comprises a nucleic acid sequence selected from the group consisting of a nucleic acid sequence according to any one of SEQ ID NO: 926-940, or a fragment or variant of any of these nucleic acid sequences, and
   [0850] a fourth coding RNA comprises a nucleic acid sequence according to any one of SEQ ID NO: 956-970, or a fragment or variant of any of these nucleic acid sequences, and/or
[0851] d) optionally, a fifth coding RNA comprises a nucleic acid sequence selected from the group consisting of SEQ ID NOs: 277; 288; 299; 310; 321; 332; 343; 354; 365; 376; 387; 461 and 398, or a fragment or variant of any of these sequences,

[0852] wherein the first, the second, the third, the fourth and the fifth coding RNAs are preferably administered intratumorally.

[0853] According to a further aspect of the present invention, a combination of an isRNA and at least one coding RNA is provided, wherein the at least one coding RNA encodes at least one peptide or protein comprising IL 12, CD40L, a decoy PD 1 receptor, preferably a soluble PD-1 receptor, and an anti-CTLA4 antibody, or a fragment or variant of any of these proteins.

[0854] The isRNA in the combination according to the invention is preferably an isRNA as described herein with respect to the is RNA for use in the treatment of a tumor or cancer disease. The at least one coding RNA of the combination according to the invention is preferably a coding RNA as described herein, more preferably a coding RNA as described herein with respect to the at least one coding RNA that is used as an additional pharmaceutically active ingredient. Additionally or alternatively the at least one coding RNA may encode at least one tumor antigen, preferably as defined herein, or a fragment or variant thereof.

[0855] In a preferred embodiment, the combination comprises an isRNA and at least one coding RNA, which are formulated together or separately, preferably as described herein.

[0856] Independent of their formulation, the isRNA and the at least one coding RNA may preferably be administered concomitantly. Alternatively, the isRNA and the at least one coding RNA of the combination may be administered in a time-staggered manner.

[0857] The phrases “administered in combination”, co-administration or “concomitant administration” as used herein refer to a situation, where one pharmaceutically active ingredient, such as the isRNA described herein, is administered to a subject before, concomittantly or after the administration of at least one additional pharmaceutically active ingredient, such as the at least one coding RNA as described herein, to the same subject. The time interval between the administration of the pharmaceutically active ingredients depends on the nature and biological effect of the particular pharmaceutically active compononent and can be determined by a physician. Preferably, the time interval is less than about 48 hours, more preferably less than about 24 hours, 12 hours, 6 hours, 4 hours, 2 hours, 1 hour, most preferably less than about 30 minutes, 15 minutes or 5 minutes. In a particularly preferred embodiment, the phrase “administered in combination” refers to concomitant administration of pharmaceutically active ingredients, i.e. the simultaneous administration of at least two compounds or the administration of at least two compounds within a time frame that typically comprises less than 5 minutes. The phrase “administered in combination” does not only refer to a situation, where the pharmaceutically active ingredients are in physical contact with each other or formulated together. The phrase “administered in combination” as used herein comprises also the separate administration of the pharmaceutically active ingredients (e.g. by two separate injections). Alternatively, one pharmaceutically active ingredient, such as the isRNA described herein, may be administered in combination by mixing the ingredient with at least one additional pharmaceutically active ingredient, such as the at least one coding RNA, prior to administration and administering the mixture to a subject.

[0858] The phrases “administered in combination”, co-administration or “concomitant administration” as used herein further comprise a situation, wherein one pharmaceutically active ingredient, such as the isRNA described herein, is administered to a subject before, concomittantly or after, more preferably after, the administration of at least one additional pharmaceutically active ingredient, such as the at least one coding RNA as described herein, to the same subject. In some embodiments, the time interval between the administration of the pharmaceutically active ingredients is at least one, two, three, four, five, six, seven, eight, nine, ten, fifteen, twenty or thirty minutes. In certain embodiments, the isRNA is administered at least one, two, three, four, five, six, seven, eight, nine, ten, fifteen, twenty or thirty minutes after administration of the at least one coding RNA as described herein.

[0859] The isRNA and the at least one coding RNA of the combination according to the invention are preferably administered at the same site or at different sites, preferably by injection. Most preferably, at least one of the isRNA and the at least one coding RNA of the combination, preferably both, are administered intratumorally, preferably as described herein.

[0860] In another aspect, the invention provides the combination of an isRNA and at least one coding RNA as described herein for use as a medicament. The invention further provides the combination of an isRNA and at least one coding RNA for use in the manufacture of a medicament.

[0861] According to one embodiment, the combination as described herein is provided for use in the treatment or prophylaxis of a disease selected from the group consisting of tumor and cancer diseases, infectious diseases, allergies and autoimmune diseases. In a preferred embodiment, the combination as described herein is provided for use in the treatment or prophylaxis of a tumor or cancer disease, preferably as defined herein. According to a particularly preferred embodiment, the combination is for use in the treatment or prophylaxis of melanoma, preferably advanced and/or metastatic melanoma, most preferably advanced cutaneous melanoma (cMEL), squamous cell cancer of the skin (SCC), preferably unresectable and/or advanced SCC, most preferably cutaneous squamous cell carcinoma (cSCC), or other forms of malignant skin cancer, adenocystic carcinoma (ACC), preferably advanced ACC, cutaneous T-cell lymphoma, preferably advanced cutaneous T-cell lymphoma, and squamous cell carcinoma of the head and neck (HNSCC), preferably advanced HNSCC. Alternatively, the combination is for use in the treatment or prophylaxis of
[0862] melanoma, preferably advanced and/or metastatic melanoma, more preferably advanced cutaneous melanoma (cMEL);
[0863] squamous cell cancer (SCC) of the skin, preferably unresectable and/or advanced SCC of the skin, more preferably cutaneous squamous cell carcinoma (cSCC), even more preferably unresectable and/or advanced cSCC;
[0864] squamous cell carcinoma of the head and neck (HNSCC), preferably advanced HNSCC, more preferably immunotherapy-refractory or platinum-refractory HNSCC, even more preferably immunotherapy-refractory advanced HNSCC or platinum-refractory advanced HNSCC;
[0865] adenocystic carcinoma (ACC), preferably advanced ACC;
[0866] cutaneous T-cell lymphoma, preferably advanced cutaneous T-cell lymphoma or cutaneous T-cell lymphoma of mycosis fungoides subtype, more preferably cutaneous T-cell lymphoma refractory to local treatment or to chemotherapy, even more preferably advanced cutaneous T-cell lymphoma refractory to local treatment or to chemotherapy, or cutaneous T-cell lymphoma of mycosis fungoides subtype refractory to local treatment or to chemotherapy, and
[0867] vulvar cancer, preferably vulvar squamous cell cancer (VSCC), more preferably advanced VSCC, even more preferably VSCC refractory to surgery or chemotherapy, most preferably advanced VSCC refractory to surgery or chemotherapy; or

[0868] for treatment or prophylaxis of a tumor or cancer disease selected from the group consisting of cutaneous melanoma (cMEL), cutaneous squamous cell carcinoma (cSCC), head and neck squamous cell carcinoma (HNSCC), adenoid cystic carcinoma (ACC), cutaneous T-cell lymphoma, preferably cutaneous T-cell lymphoma of mycosis fungoides subtype, and vulvar squamous cell cancer (VSCC), wherein the tumor or the cancer disease is preferably at an advanced stage and/or refractory to standard therapy.

[0869] Preferably, the combination as described herein is for use in the treatment or prophylaxis of a disease as described herein, wherein the treatment or prophylaxis comprises administration of at least one additional pharmaceutically active ingredient, preferably as described herein. In a preferred embodiment, the combination is for use in the treatment or prophylaxis of
[0870] melanoma, preferably advanced and/or metastatic melanoma, more preferably advanced cutaneous melanoma (cMEL);
[0871] squamous cell cancer (SCC) of the skin, preferably unresectable and/or advanced SCC of the skin, more preferably cutaneous squamous cell carcinoma (cSCC), even more preferably unresectable and/or advanced cSCC;
[0872] squamous cell carcinoma of the head and neck (HNSCC), preferably advanced HNSCC, more preferably immunotherapy-refractory or platinum-refractory HNSCC, even more preferably immunotherapy-refractory advanced HNSCC or platinum-refractory advanced HNSCC;
[0873] adenocystic carcinoma (ACC), preferably advanced ACC;
[0874] cutaneous T-cell lymphoma, preferably advanced cutaneous T-cell lymphoma or cutaneous T-cell lymphoma of mycosis fungoides subtype, more preferably cutaneous T-cell lymphoma refractory to local treatment or to chemotherapy, even more preferably advanced cutaneous T-cell lymphoma refractory to local treatment or to chemotherapy, or cutaneous T-cell lymphoma of mycosis fungoides subtype refractory to local treatment or to chemotherapy, and
[0875] vulvar cancer, preferably vulvar squamous cell cancer (VSCC), more preferably advanced VSCC, even more preferably VSCC refractory to surgery or chemotherapy, most preferably advanced VSCC refractory to surgery or chemotherapy; or

[0876] for treatment or prophylaxis of a tumor or cancer disease selected from the group consisting of cutaneous melanoma (cMEL), cutaneous squamous cell carcinoma (cSCC), head and neck squamous cell carcinoma (HNSCC), adenoid cystic carcinoma (ACC), cutaneous T-cell lymphoma, preferably cutaneous T-cell lymphoma of mycosis fungoides subtype, and vulvar squamous cell cancer (VSCC), wherein the tumor or the cancer disease is preferably at an advanced stage and/or refractory to standard therapy;

[0877] wherein the treatment or prophylaxis comprises administration of at least one additional pharmaceutically active ingredient, wherein the at least one additional pharmaceutically active ingredient is a compound conventionally used in the treatment or prophylaxis of any of said diseases, preferably a compound as described herein in that context.

[0878] According to a particularly preferred embodiment, the combination as described herein is for use in the treatment or prophylaxis of
[0879] melanoma, preferably advanced and/or metastatic melanoma, more preferably advanced cutaneous melanoma (cMEL);
[0880] squamous cell cancer (SCC) of the skin, preferably unresectable and/or advanced SCC of the skin, more preferably cutaneous squamous cell carcinoma (cSCC), even more preferably unresectable and/or advanced cSCC;
[0881] squamous cell carcinoma of the head and neck (HNSCC), preferably advanced HNSCC, more preferably immunotherapy-refractory or platinum-refractory HNSCC, even more preferably immunotherapy-refractory advanced HNSCC or platinum-refractory advanced HNSCC;
[0882] adenocystic carcinoma (ACC), preferably advanced ACC;
[0883] cutaneous T-cell lymphoma, preferably advanced cutaneous T-cell lymphoma or cutaneous T-cell lymphoma of mycosis fungoides subtype, more preferably cutaneous T-cell lymphoma refractory to local treatment or to chemotherapy, even more preferably advanced cutaneous T-cell lymphoma refractory to local treatment or to chemotherapy, or cutaneous T-cell lymphoma of mycosis fungoides subtype refractory to local treatment or to chemotherapy, and
[0884] vulvar cancer, preferably vulvar squamous cell cancer (VSCC), more preferably advanced VSCC, even more preferably VSCC refractory to surgery or chemotherapy, most preferably advanced VSCC refractory to surgery or chemotherapy; or

[0885] for treatment or prophylaxis of a tumor or cancer disease selected from the group consisting of cutaneous melanoma (cMEL), cutaneous squamous cell carcinoma (cSCC), head and neck squamous cell carcinoma (HNSCC), adenoid cystic carcinoma (ACC), cutaneous T-cell lymphoma, preferably cutaneous T-cell lymphoma of mycosis fungoides subtype, and vulvar squamous cell cancer (VSCC), wherein the tumor or the cancer disease is preferably at an advanced stage and/or refractory to standard therapy;

[0886] wherein the treatment or prophylaxis comprises administration of a PD 1 inhibitor or a PD-L1 inhibitor, preferably as described herein, more preferably an antagonistic antibody directed against PD-1 or PD-L1.

[0887] In a further preferred embodiment, the combination as described herein is for use in the treatment or prophylaxis of
[0888] melanoma, preferably advanced and/or metastatic melanoma, more preferably advanced cutaneous melanoma (cMEL);
[0889] squamous cell cancer (SCC) of the skin, preferably unresectable and/or advanced SCC of the skin, more preferably cutaneous squamous cell carcinoma (cSCC), even more preferably unresectable and/or advanced cSCC;
[0890] squamous cell carcinoma of the head and neck (HNSCC), preferably advanced HNSCC, more preferably immunotherapy-refractory or platinum-refractory HNSCC, even more preferably immunotherapy-refractory advanced HNSCC or platinum-refractory advanced HNSCC;
[0891] adenocystic carcinoma (ACC), preferably advanced ACC;
[0892] cutaneous T-cell lymphoma, preferably advanced cutaneous T-cell lymphoma or cutaneous T-cell lymphoma of mycosis fungoides subtype, more preferably cutaneous T-cell lymphoma refractory to local treatment or to chemotherapy, even more preferably advanced cutaneous T-cell lymphoma refractory to local treatment or to chemotherapy, or cutaneous T-cell lymphoma of mycosis fungoides subtype refractory to local treatment or to chemotherapy, and
[0893] vulvar cancer, preferably vulvar squamous cell cancer (VSCC), more preferably advanced VSCC, even more preferably VSCC refractory to surgery or chemotherapy, most preferably advanced VSCC refractory to surgery or chemotherapy; or

[0894] for treatment or prophylaxis of a tumor or cancer disease selected from the group consisting of cutaneous melanoma (cMEL), cutaneous squamous cell carcinoma (cSCC), head and neck squamous cell carcinoma (HNSCC), adenoid cystic carcinoma (ACC), cutaneous T-cell lymphoma, preferably cutaneous T-cell lymphoma of mycosis fungoides subtype, and vulvar squamous cell cancer (VSCC), wherein the tumor or the cancer disease is preferably at an advanced stage and/or refractory to standard therapy;

[0895] wherein the treatment or prophylaxis comprises administration of an anti-CTLA4 antibody, preferably as described herein.

[0896] In a further aspect, the present invention concerns a coding RNA as described herein. The coding RNA according to the invention is typically characterized by any one of the features described herein in the context of the at least one coding RNA that may also be used as an additional pharmaceutically active ingredient as described herein with respect to the isRNA for use according to the invention. In particular, the coding RNA according to the invention encodes a peptide or protein comprising at least one peptide or protein selected from the group consisting of IL 12, CD40L, a decoy PD-1 receptor, preferably a soluble PD-1 receptor, an anti-CTLA4 antibody, and a tumor antigen, or a fragment or variant of any of these proteins.

[0897] According to a preferred embodiment, the coding RNA according to the invention encodes a peptide or protein comprising IL 12, CD40L and a decoy PD-1 receptor, preferably a soluble PD-1 receptor, or a fragment or variant of any of these proteins. For example, the coding RNA encoding said peptide or protein may be a multicistronic RNA comprising three open reading frames, wherein each open reading frame encodes a different peptide or protein selected from the group consisting of IL 12, CD40L, a decoy PD-1 receptor, preferably a soluble PD-1 receptor, an anti-CTLA4 antibody, and a tumor antigen, or a fragment or variant of any of these proteins.

[0898] In a further aspect, the present invention concerns the coding RNA according to the invention for use in the treatment or prophylaxis of a disease selected from the group consisting of tumor and cancer diseases, infectious diseases, allergies and autoimmune diseases. In a preferred embodiment, the coding RNA as described herein is provided for use in the treatment or prophylaxis of a tumor or cancer disease, preferably as defined herein. According to a particularly preferred embodiment, the coding RNA is for use in the treatment or prophylaxis of melanoma, preferably advanced and/or metastatic melanoma, most preferably advanced cutaneous melanoma (cMEL), squamous cell cancer of the skin (SCC), preferably unresectable and/or advanced SCC, most preferably cutaneous squamous cell carcinoma (cSCC), or other forms of malignant skin cancer, adenocystic carcinoma (ACC), preferably advanced ACC, cutaneous T-cell lymphoma, preferably advanced cutaneous T-cell lymphoma, and squamous cell carcinoma of the head and neck (HNSCC), preferably advanced HNSCC. In a further preferred embodiment, the coding RNA is for use in the treatment or prophylaxis of
[0899] melanoma, preferably advanced and/or metastatic melanoma, more preferably advanced cutaneous melanoma (cMEL);
[0900] squamous cell cancer (SCC) of the skin, preferably unresectable and/or advanced SCC of the skin, more preferably cutaneous squamous cell carcinoma (cSCC), even more preferably unresectable and/or advanced cSCC;
[0901] squamous cell carcinoma of the head and neck (HNSCC), preferably advanced HNSCC, more preferably immunotherapy-refractory or platinum-refractory HNSCC, even more preferably immunotherapy-refractory advanced HNSCC or platinum-refractory advanced HNSCC;
[0902] adenocystic carcinoma (ACC), preferably advanced ACC;
[0903] cutaneous T-cell lymphoma, preferably advanced cutaneous T-cell lymphoma or cutaneous T-cell lymphoma of mycosis fungoides subtype, more preferably cutaneous T-cell lymphoma refractory to local treatment or to chemotherapy, even more preferably advanced cutaneous T-cell lymphoma refractory to local treatment or to chemotherapy, or cutaneous T-cell lymphoma of mycosis fungoides subtype refractory to local treatment or to chemotherapy, and
[0904] vulvar cancer, preferably vulvar squamous cell cancer (VSCC), more preferably advanced VSCC, even more preferably VSCC refractory to surgery or chemotherapy, most preferably advanced VSCC refractory to surgery or chemotherapy; or

[0905] for treatment or prophylaxis of a tumor or cancer disease selected from the group consisting of cutaneous melanoma (cMEL), cutaneous squamous cell carcinoma (cSCC), head and neck squamous cell carcinoma (HNSCC), adenoid cystic carcinoma (ACC), cutaneous T-cell lymphoma, preferably cutaneous T-cell lymphoma of mycosis fungoides subtype, and vulvar squamous cell cancer (VSCC), wherein the tumor or the cancer disease is preferably at an advanced stage and/or refractory to standard therapy.

[0906] The coding RNA according to the invention is preferably provided for use in the treatment or prophylaxis of a disease as described herein, preferably in the treatment or prophylaxis of melanoma, preferably advanced and/or metastatic melanoma, most preferably advanced cutaneous melanoma (cMEL), squamous cell cancer of the skin (SCC), preferably unresectable and/or advanced SCC, most preferably cutaneous squamous cell carcinoma (cSCC), or other forms of malignant skin cancer, adenocystic carcinoma (ACC), preferably advanced ACC, cutaneous T-cell lymphoma, preferably advanced cutaneous T-cell lymphoma, and squamous cell carcinoma of the head and neck (HNSCC), preferably advanced HNSCC;

[0907] wherein the coding RNA comprises at least one coding sequence encoding a peptide or protein comprising IL-12, CD40L or a decoy PD-1 receptor, preferably a soluble PD-1 receptor, or a fragment or variant thereof, and wherein the treatment or prophylaxis comprises administration of a second coding RNA and/or a third coding RNA, wherein the second or third coding RNA comprises at least one coding sequence encoding a peptide or protein comprising CD40L or a decoy PD 1 receptor, preferably a soluble PD-1 receptor, or a fragment or variant thereof, so that the peptide(s) or protein(s) encoded by the coding RNAs together comprise IL-12, CD40L or a decoy PD-1 receptor, preferably a soluble PD-1 receptor, or a fragment or variant thereof. Therein, the coding RNA as well as the second and/or third coding RNAs are preferably coding RNAs as described herein.

[0908] The coding RNA according to the invention is preferably provided for use in the treatment or prophylaxis of a disease as described herein, preferably in the treatment or prophylaxis of
[0909] melanoma, preferably advanced and/or metastatic melanoma, more preferably advanced cutaneous melanoma (cMEL);
[0910] squamous cell cancer (SCC) of the skin, preferably unresectable and/or advanced SCC of the skin, more preferably cutaneous squamous cell carcinoma (cSCC), even more preferably unresectable and/or advanced cSCC;
[0911] squamous cell carcinoma of the head and neck (HNSCC), preferably advanced HNSCC, more preferably immunotherapy-refractory or platinum-refractory HNSCC, even more preferably immunotherapy-refractory advanced HNSCC or platinum-refractory advanced HNSCC;
[0912] adenocystic carcinoma (ACC), preferably advanced ACC;
[0913] cutaneous T-cell lymphoma, preferably advanced cutaneous T-cell lymphoma or cutaneous T-cell lymphoma of mycosis fungoides subtype, more preferably cutaneous T-cell lymphoma refractory to local treatment or to chemotherapy, even more preferably advanced cutaneous T-cell lymphoma refractory to local treatment or to chemotherapy, or cutaneous T-cell lymphoma of mycosis fungoides subtype refractory to local treatment or to chemotherapy, and
[0914] vulvar cancer, preferably vulvar squamous cell cancer (VSCC), more preferably advanced VSCC, even more preferably VSCC refractory to surgery or chemotherapy, most preferably advanced VSCC refractory to surgery or chemotherapy; or

[0915] for treatment or prophylaxis of a tumor or cancer disease selected from the group consisting of cutaneous melanoma (cMEL), cutaneous squamous cell carcinoma (cSCC), head and neck squamous cell carcinoma (HNSCC), adenoid cystic carcinoma (ACC), cutaneous T-cell lymphoma, preferably cutaneous T-cell lymphoma of mycosis fungoides subtype, and vulvar squamous cell cancer (VSCC), wherein the tumor or the cancer disease is preferably at an advanced stage and/or refractory to standard therapy;

[0916] wherein the coding RNA comprises at least one coding sequence encoding a peptide or protein comprising IL-12, CD40L, a decoy PD-1 receptor, preferably a soluble PD-1 receptor, or an anti-CTLA4 antibody, or a fragment or variant of any of these peptides or proteins, and wherein the treatment or prophylaxis comprises administration of a second coding RNA, a third coding RNA and/or a fourth coding RNA, wherein the second, third or fourth coding RNA comprises at least one coding sequence encoding a peptide or protein comprising IL12, CD40L, a decoy PD 1 receptor, preferably a soluble PD-1 receptor, or an anti-CTLA4 antibody or a fragment or variant thereof, so that the peptide(s) or protein(s) encoded by the coding RNAs together comprise IL-12, CD40L, a decoy PD-1 receptor, preferably a soluble PD-1 receptor, and an anti-CTLA4 antibody, or a fragment or variant thereof. Therein, the coding RNA as well as the second, third or fourth coding RNAs are preferably coding RNAs as described herein.

[0917] In certain embodiments, the coding RNA is provided for use in the treatment or prophylaxis of a disease as described herein, wherein the treatment or prophylaxis further comprises chemotherapy, radiation therapy and/or surgery. According to a preferred embodiment, the treatment or prophylaxis comprises the administration of at least one additional pharmaceutically active ingredient. In a further preferred embodiment, the treatment or prophylaxis comprises the administration of a compound that is conventionally used in the treatment of
[0918] melanoma, preferably advanced and/or metastatic melanoma, more preferably advanced cutaneous melanoma (cMEL);
[0919] squamous cell cancer (SCC) of the skin, preferably unresectable and/or advanced SCC of the skin, more preferably cutaneous squamous cell carcinoma (cSCC), even more preferably unresectable and/or advanced cSCC;
[0920] squamous cell carcinoma of the head and neck (HNSCC), preferably advanced HNSCC, more preferably immunotherapy-refractory or platinum-refractory HNSCC, even more preferably immunotherapy-refractory advanced HNSCC or platinum-refractory advanced HNSCC;
[0921] adenocystic carcinoma (ACC), preferably advanced ACC;
[0922] cutaneous T-cell lymphoma, preferably advanced cutaneous T-cell lymphoma or cutaneous T-cell lymphoma of mycosis fungoides subtype, more preferably cutaneous T-cell lymphoma refractory to local treatment or to chemotherapy, even more preferably advanced cutaneous T-cell lymphoma refractory to local treatment or to chemotherapy, or cutaneous T-cell lymphoma of mycosis fungoides subtype refractory to local treatment or to chemotherapy, and
[0923] vulvar cancer, preferably vulvar squamous cell cancer (VSCC), more preferably advanced VSCC, even more preferably VSCC refractory to surgery or chemotherapy, most preferably advanced VSCC refractory to surgery or chemotherapy; or

[0924] in the treatment or prophylaxis of a tumor or cancer disease selected from the group consisting of cutaneous melanoma (cMEL), cutaneous squamous cell carcinoma (cSCC), head and neck squamous cell carcinoma (HNSCC), adenoid cystic carcinoma (ACC), cutaneous T-cell lymphoma, preferably cutaneous T-cell lymphoma of mycosis fungoides subtype, and vulvar squamous cell cancer (VSCC), wherein the tumor or the cancer disease is preferably at an advanced stage and/or refractory to standard therapy;

[0925] preferably a compound as described herein in that context. More preferably, the treatment or prophylaxis comprises the administration of a PD 1 inhibitor or a PD L1 inhibitor, preferably an antagonistic antibody directed against PD-1 or PD-L1. In a particularly preferred embodiment, the treatment or prophylaxis comprises the administration, preferably intratumorally, of an isRNA, preferably an isRNA as described herein.

[0926] In some embodiments, the treatment or prophylaxis comprises the administration of a compound that is conventionally used in the treatment of
[0927] melanoma, preferably advanced and/or metastatic melanoma, more preferably advanced cutaneous melanoma (cMEL);
[0928] squamous cell cancer (SCC) of the skin, preferably unresectable and/or advanced SCC of the skin, more preferably cutaneous squamous cell carcinoma (cSCC), even more preferably unresectable and/or advanced cSCC;
[0929] squamous cell carcinoma of the head and neck (HNSCC), preferably advanced HNSCC, more preferably immunotherapy-refractory or platinum-refractory HNSCC, even more preferably immunotherapy-refractory advanced HNSCC or platinum-refractory advanced HNSCC;
[0930] adenocystic carcinoma (ACC), preferably advanced ACC;
[0931] cutaneous T-cell lymphoma, preferably advanced cutaneous T-cell lymphoma or cutaneous T-cell lymphoma of mycosis fungoides subtype, more preferably cutaneous T-cell lymphoma refractory to local treatment or to chemotherapy, even more preferably advanced cutaneous T-cell lymphoma refractory to local treatment or to chemotherapy, or cutaneous T-cell lymphoma of mycosis fungoides subtype refractory to local treatment or to chemotherapy, and
[0932] vulvar cancer, preferably vulvar squamous cell cancer (VSCC), more preferably advanced VSCC, even more preferably VSCC refractory to surgery or chemotherapy, most preferably advanced VSCC refractory to surgery or chemotherapy; or

[0933] in the treatment or prophylaxis of a tumor or cancer disease selected from the group consisting of cutaneous melanoma (cMEL), cutaneous squamous cell carcinoma (cSCC), head and neck squamous cell carcinoma (HNSCC), adenoid cystic carcinoma (ACC), cutaneous T-cell lymphoma, preferably cutaneous T-cell lymphoma of mycosis fungoides subtype, and vulvar squamous cell cancer (VSCC), wherein the tumor or the cancer disease is preferably at an advanced stage and/or refractory to standard therapy; preferably a compound as described herein in that context. More preferably, the treatment or prophylaxis comprises the administration of an anti-CTLA4 antibody. In a particularly preferred embodiment, the treatment or prophylaxis comprises the administration, preferably intratumorally, of an isRNA, preferably an isRNA as described herein.

[0934] The coding RNA for use as described herein is preferably administered intratumorally. In a particularly preferred embodiment, the coding RNA for use as described herein is administered intratumorally.

[0935] In a further aspect, the present invention provides a pharmaceutical composition comprising an isRNA, preferably as described herein, at least one coding RNA, preferably as described herein, or the combination thereof, wherein the pharmaceutical composition comprises a pharmaceutically acceptable carrier and/or vehicle.

[0936] Preferably, the pharmaceutical composition is prepared for intratumoral application, preferably by injection into tumor tissue. Sterile injectable forms of the inventive pharmaceutical composition may be aqueous or oleaginous suspension. These suspensions may be formulated according to techniques known in the art using suitable dispersing or wetting agents and suspending agents.

[0937] A pharmaceutically acceptable carrier typically includes the liquid or non-liquid basis of a composition comprising an isRNA, preferably as described herein, at least one coding RNA, preferably as described herein, or the combination thereof as described herein. If the composition is provided in liquid form, the carrier will typically be pyrogen-free water; isotonic saline or buffered (aqueous) solutions, e.g. phosphate, citrate etc. buffered solutions. The injection buffer may be hypertonic, isotonic or hypotonic with reference to the specific reference medium, i.e. the buffer may have a higher, identical or lower salt content with reference to the specific reference medium, wherein preferably such concentrations of the afore mentioned salts may be used, which do not lead to damage of cells due to osmosis or other concentration effects. Reference media are e.g. liquids occurring in “in vivo” methods, such as blood, lymph, cytosolic liquids, or other body liquids, or e.g. liquids, which may be used as reference media in “in vitro” methods, such as common buffers or liquids. Such common buffers or liquids are known to a skilled person. Ringer-Lactate solution is particularly preferred as a liquid basis.

[0938] However, one or more compatible solid or liquid fillers or diluents or encapsulating compounds, which are suitable for administration to a patient to be treated, may be used as well for the pharmaceutical composition according to the invention. The term “compatible” as used herein means that these constituents of the inventive pharmaceutical composition are capable of being mixed with the components of the inventive pharmaceutical composition in such a manner that no interaction occurs which would substantially reduce the pharmaceutical effectiveness of the pharmaceutical composition under typical use conditions.

[0939] The inventive pharmaceutical composition may comprise further components for facilitating administration and uptake of components of the pharmaceutical composition. Such further components may be an appropriate carrier or vehicle, additional adjuvants for supporting any immune response, antibacterial and/or antiviral agents.

[0940] A further component of the inventive pharmaceutical composition may be an immunotherapeutic agent that can be selected from immunoglobulins, preferably IgGs, monoclonal or polyclonal antibodies, polyclonal serum or sera, etc.

[0941] Preferably, such a further immunotherapeutic agent may be provided as a peptide/protein or may be encoded by a nucleic acid, preferably by a DNA or an RNA, more preferably an mRNA.

[0942] The inventive pharmaceutical composition typically comprises a “safe and effective amount” of the components of the inventive pharmaceutical composition, particularly of the isRNA, the coding RNA as defined herein or the combination thereof as defined herein. As used herein, a “safe and effective amount” means an amount of the RNA molecule(s) as defined herein as such that is sufficient to significantly induce a positive modification of the disease, preferably of a tumor or cancer disease. At the same time, however, a “safe and effective amount” is small enough to avoid serious side-effects and to permit a sensible relationship between advantage and risk. The determination of these limits typically lies within the scope of sensible medical judgment.

[0943] The inventive pharmaceutical composition may be used for human and also for veterinary medical purposes, preferably for human medical purposes, as a pharmaceutical composition in general.

[0944] According to another particularly preferred aspect, the pharmaceutical composition as described herein may be provided or used as a vaccine. Typically, such a vaccine is as defined above for pharmaceutical compositions. Preferably, such a vaccine typically contains the isRNA as described herein, the at least one coding RNA as described herein or the combination thereof as described herein. The vaccine may also comprise a pharmaceutically acceptable carrier, adjuvant, and/or vehicle as defined herein for the pharmaceutical composition. In the specific context of the vaccine, the choice of a pharmaceutically acceptable carrier is determined in principle by the manner, in which the inventive vaccine is administered. The vaccine may preferably be administered locally into tumor tissue.

[0945] The vaccine can additionally contain one or more auxiliary substances in order to increase its immunogenicity or immunostimulatory capacity, if desired. Particularly preferred are adjuvants as auxiliary substances or additives as defined for the pharmaceutical composition.

[0946] In a further aspect, the invention relates to a kit or kit of parts comprising the isRNA as described herein, at least one coding RNA as described herein, the combination as described comprising the isRNA and at least one coding RNA as described herein or comprising the pharmaceutical composition or vaccine as described herein, or the components thereof and optionally technical instructions with information on the administration and dosage of the components.

[0947] Besides the isRNA and/or at least one coding RNA, the kit may additionally contain a pharmaceutically acceptable vehicle, an adjuvant and at least one further component e.g. an additional pharmaceutically active component/compound as defined herein, as well as means for administration and technical instructions. The components of the composition, in particular the isRNA or the at least one coding RNA as described herein, and possibly further components may be provided in lyophilized form. In a preferred embodiment, prior to use of the kit, the provided vehicle is then added to the lyophilized components in a predetermined amount as written e.g. in the provided technical instructions.

[0948] In a particularly preferred embodiment, the kit may comprise the isRNA, preferably complexed by a polymeric carrier, as described herein in lyophilized form and the at least one coding RNA as described herein in lyophilized form and additionally a pharmaceutically acceptable vehicle, an adjuvant and at least one further component e.g. an additional pharmaceutically active component/compound as defined herein, as well as means for administration and technical instructions. Preferably, the kit comprises the isRNA, preferably complexed by a polymeric carrier, as described herein in lyophilized form and at least three, preferably at least four or five, coding RNAs encoding IL-12, CD40L, a decoy PD-1 receptor, preferably a soluble PD-1 receptor, an ati-CTLA4 antibody, and/or a tumor antigen as described herein, or a fragment or variant of any of these, in lyophilized form and a liquid for reconstitution, e.g. Ringer's Lactate solution or water.

[0949] The present invention furthermore several applications and uses of the isRNA as described herein, the at least one coding RNA as described herein, the combination thereof as described herein, or, respectively, the pharmaceutical composition, or the vaccine, or the kit or kit of parts as defined herein. As a main aspect of the invention, the isRNA as described herein, the at least one coding RNA as described herein, the combination thereof as described herein, or, respectively, the pharmaceutical composition or the kit or kit of parts may be used as a medicament, preferably for treatment or prophylaxis of a disease as described herein, more preferably for treatment of tumor or cancer diseases, most preferably for treatment of
[0950] melanoma, preferably advanced and/or metastatic melanoma, more preferably advanced cutaneous melanoma (cMEL);
[0951] squamous cell cancer (SCC) of the skin, preferably unresectable and/or advanced SCC of the skin, more preferably cutaneous squamous cell carcinoma (cSCC), even more preferably unresectable and/or advanced cSCC;
[0952] squamous cell carcinoma of the head and neck (HNSCC), preferably advanced HNSCC, more preferably immunotherapy-refractory or platinum-refractory HNSCC, even more preferably immunotherapy-refractory advanced HNSCC or platinum-refractory advanced HNSCC;
[0953] adenocystic carcinoma (ACC), preferably advanced ACC;
[0954] cutaneous T-cell lymphoma, preferably advanced cutaneous T-cell lymphoma or cutaneous T-cell lymphoma of mycosis fungoides subtype, more preferably cutaneous T-cell lymphoma refractory to local treatment or to chemotherapy, even more preferably advanced cutaneous T-cell lymphoma refractory to local treatment or to chemotherapy, or cutaneous T-cell lymphoma of mycosis fungoides subtype refractory to local treatment or to chemotherapy, and
[0955] vulvar cancer, preferably vulvar squamous cell cancer (VSCC), more preferably advanced VSCC, even more preferably VSCC refractory to surgery or chemotherapy, most preferably advanced VSCC refractory to surgery or chemotherapy; or

[0956] for the treatment of a tumor or cancer disease selected from the group consisting of cutaneous melanoma (cMEL), cutaneous squamous cell carcinoma (cSCC), head and neck squamous cell carcinoma (HNSCC), adenoid cystic carcinoma (ACC), cutaneous T-cell lymphoma, preferably cutaneous T-cell lymphoma of mycosis fungoides subtype, and vulvar squamous cell cancer (VSCC), wherein the tumor or the cancer disease is preferably at an advanced stage and/or refractory to standard therapy.

[0957] The present invention thus provides the isRNA as described herein, the at least one coding RNA as described herein, the combination thereof as described herein, or, respectively, the pharmaceutical composition, or the vaccine, or the kit or kit of parts for use in the manufacture of a medicament. In this context, the treatment is preferably carried out by intratumoral application, especially by injection into tumor tissue. According to another aspect, the present invention is directed to the second medical use of the isRNA as described herein, the at least one coding RNA as described herein, the combination thereof as described herein, or, respectively, the pharmaceutical composition, or the vaccine, or the kit or kit of parts as described above, wherein these subject matters are used for preparation of a medicament particularly for intratumoral application (administration) for treatment of tumor or cancer diseases, preferably as described herein.

[0958] In one aspect, the present invention provides a method of treating or preventing a disorder, wherein the method comprises administering, preferably intratumorally, to a subject in need thereof an effective amount of a medicament as described herein, preferably of the isRNA as described herein, of the at least one coding RNA as described herein, of the combination thereof as described herein, or, respectively, of the pharmaceutical composition, or of the vaccine. More preferably, the method is for treating or preventing a tumor or cancer disease as described herein, most preferably a disorder selected from the group consisting of
[0959] melanoma, preferably advanced and/or metastatic melanoma, more preferably advanced cutaneous melanoma (cMEL);
[0960] squamous cell cancer (SCC) of the skin, preferably unresectable and/or advanced SCC of the skin, more preferably cutaneous squamous cell carcinoma (cSCC), even more preferably unresectable and/or advanced cSCC;
[0961] squamous cell carcinoma of the head and neck (HNSCC), preferably advanced HNSCC, more preferably immunotherapy-refractory or platinum-refractory HNSCC, even more preferably immunotherapy-refractory advanced HNSCC or platinum-refractory advanced HNSCC;
[0962] adenocystic carcinoma (ACC), preferably advanced ACC;
[0963] cutaneous T-cell lymphoma, preferably advanced cutaneous T-cell lymphoma or cutaneous T-cell lymphoma of mycosis fungoides subtype, more preferably cutaneous T-cell lymphoma refractory to local treatment or to chemotherapy, even more preferably advanced cutaneous T-cell lymphoma refractory to local treatment or to chemotherapy, or cutaneous T-cell lymphoma of mycosis fungoides subtype refractory to local treatment or to chemotherapy, and
[0964] vulvar cancer, preferably vulvar squamous cell cancer (VSCC), more preferably advanced VSCC, even more preferably VSCC refractory to surgery or chemotherapy, most preferably advanced VSCC refractory to surgery or chemotherapy; or

[0965] selected from the group consisting of cutaneous melanoma (cMEL), cutaneous squamous cell carcinoma (cSCC), head and neck squamous cell carcinoma (HNSCC), adenoid cystic carcinoma (ACC), cutaneous T-cell lymphoma, preferably cutaneous T-cell lymphoma of mycosis fungoides subtype, and vulvar squamous cell cancer (VSCC), wherein the disorder is preferably at an advanced stage and/or refractory to standard therapy.

[0966] The present invention thus provides the isRNA as described herein, the at least one coding RNA as described herein, the combination thereof as described herein, or, respectively, the pharmaceutical composition, or the vaccine, or the kit or kit of parts as defined herein as a medicament. Accordingly, the term “medicament” as used herein typically refers to the isRNA as described herein, the at least one coding RNA as described herein, the combination thereof as described herein (preferably formulated in order to allow administration, e.g. in a liquid formulation), or, respectively, the pharmaceutical composition, or the vaccine, or the kit or kit of parts as defined herein. In this context, it is preferred that the isRNA and/or the at least one coding RNA as described herein are provided in lyophilized form and are re-solubilized prior to administration, for instance by addition of a suitable vehicle as known in the art or as described herein, such as Ringer's Lactate solution or water.

[0967] The medicament as described herein may be administered by conventional needle injection or needle-free jet injection into the tumor tissue. In a preferred embodiment the medicament is administered by jet injection. Jet injection refers to a needle-free injection method, wherein a fluid comprising the composition and, optionally, further suitable excipients is forced through an orifice, thus generating an ultra-fine liquid stream of high pressure that is capable of penetrating mammalian skin. In principle, the liquid stream forms a hole in the skin, through which the liquid stream is pushed into the target tissue, namely the tumor tissue. According to the invention, jet injection may be used for intratumoral application of the medicament as described herein.

[0968] The medicament may be administered by conventional needle injection or needle-free jet injection adjacent to and/or in close proximity to the tumor tissue. In a preferred embodiment the medicament is administered by jet injection adjacent to and/or in close proximity to the tumor tissue. According to the invention, jet injection may be used for intratumoral application (adjacent to and/or in close proximity to the tumor tissue), particularly for injection of the medicament.

[0969] In some embodiments, the medicament may be administered orally, parenterally, by inhalation spray, topically, rectally, nasally, buccally, vaginally or via an implanted reservoir. The term parenteral as used herein includes subcutaneous, intravenous, intramuscular, intraarticular, intranodal, intrasynovial, intrasternal, intrathecal, intrahepatic, intralesional, intracranial, transdermal, intradermal, intrapulmonal, intraperitoneal, intracardial, intraarterial, and sublingual injection or infusion techniques. Further particularly preferred administration routes are intradermal and intramuscular injection. Preferably, the administration comprises an imaging technique, preferably as described herein. More preferably, the medicament is administered locoregionally, preferably as described herein. Even more preferably, the medicament is administered locoregionally, wherein the administration comprises an imaging technique, preferably as described herein.

[0970] According to a further embodiment, the treatment or prophylaxis of a disease, preferably of a tumor or cancer disease as described herein, comprises administration of at least one pharmaceutical composition comprising the isRNA as described herein and the administration of at least one further pharmaceutical composition comprising at least one coding RNA as described herein, wherein the pharmaceutical compositions may be administered via the same or via different routes. More preferably, the pharmaceutical compositions are administered via the same route, preferably intratumorally, e.g. by intratumoral or peritumoral injection.

[0971] According to a specific embodiment, the medicament may be administered to the patient as a single dose or as several doses. In certain embodiments, the medicament may be administered to a patient as a single dose followed by a second dose later and optionally even a third, fourth (or more) dose subsequent thereto etc.

[0972] Preferably, the medicament comprises at least 25 μg of isRNA and/or coding RNA per dose. Alternatively, a single dose of the medicament may comprise at least 15, 20, 25, 30, 35, 40, 45, 50, 55, 60, 65, 70, 75, 80, 85, 90, 95 or 100 μg of isRNA and/or coding RNA as described herein. More specifically, the amount of isRNA and/or coding RNA comprised in a single dose is typically at least 100 μg or 200 μg, preferably from 200 μg to 1.000 μg, more preferably from 300 μg to 850 μg, even more preferably from 300 μg to 700 μg. Where the medicament comprises more than one type of RNA, the values above preferably refer to the amounts of each single type of RNA.

[0973] According to a particularly preferred embodiment, the present invention provides an isRNA as described herein for use in the treatment of a tumor or cancer disease, preferably a disease selected from the group consisting of
[0974] melanoma, preferably advanced and/or metastatic melanoma, more preferably advanced cutaneous melanoma (cMEL);
[0975] squamous cell cancer (SCC) of the skin, preferably unresectable and/or advanced SCC of the skin, more preferably cutaneous squamous cell carcinoma (cSCC), even more preferably unresectable and/or advanced cSCC;
[0976] squamous cell carcinoma of the head and neck (HNSCC), preferably advanced HNSCC, more preferably immunotherapy-refractory or platinum-refractory HNSCC, even more preferably immunotherapy-refractory advanced HNSCC or platinum-refractory advanced HNSCC;
[0977] adenocystic carcinoma (ACC), preferably advanced ACC;
[0978] cutaneous T-cell lymphoma, preferably advanced cutaneous T-cell lymphoma or cutaneous T-cell lymphoma of mycosis fungoides subtype, more preferably cutaneous T-cell lymphoma refractory to local treatment or to chemotherapy, even more preferably advanced cutaneous T-cell lymphoma refractory to local treatment or to chemotherapy, or cutaneous T-cell lymphoma of mycosis fungoides subtype refractory to local treatment or to chemotherapy, and
[0979] vulvar cancer, preferably vulvar squamous cell cancer (VSCC), more preferably advanced VSCC, even more preferably VSCC refractory to surgery or chemotherapy, most preferably advanced VSCC refractory to surgery or chemotherapy; or

[0980] selected from the group consisting of cutaneous melanoma (cMEL), cutaneous squamous cell carcinoma (cSCC), head and neck squamous cell carcinoma (HNSCC), adenoid cystic carcinoma (ACC), cutaneous T-cell lymphoma, preferably cutaneous T-cell lymphoma of mycosis fungoides subtype, and vulvar squamous cell cancer (VSCC), wherein the disease is preferably at an advanced stage and/or refractory to standard therapy.

[0981] Preferably, the treatment comprises administration, preferably intratumorally, of an isRNA as described herein, which is complexed by a cationic or polycationic compound. In a preferred embodiment, the isRNA comprises a nucleic acid sequence according to formula (I) (GₗXₘGₙ), formula (II) (CₗXₘCₙ), formula (III) (NᵤGₗXₘGₙNᵥ)ₐ or formula (IV) (NᵤCₗXₘCₙNᵥ)ₐ, preferably at least one nucleic acid sequence according to any one of SEQ ID NOs: 433 to 437, 1014 to 1016, 1055 or 1056, or a fragment or variant of any of these sequences, preferably according to any one of SEQ ID NOs: 433, 434 or 1014 to 1016, or a fragment or variant of any of these nucleic acid sequences, wherein the isRNA is complexed with a cationic or polycationic compound, preferably with a polymeric carrier, more preferably with a polymeric carrier that is formed by a disulfide-crosslinked cationic component, which preferably comprises a peptide according to formula (V), (Va) and/or (Vb) and/or a compound according to formula (VI), more preferably at least one of the disulfide-crosslinked cationic peptides Cys-Arg₁₂ (SEQ ID NO: 580) or Cys-Arg₁₂-Cys (SEQ ID NO: 579). More preferably, the isRNA comprises a nucleic acid sequence according to SEQ ID NOs: 433 to 437, 1014 to 1016, or a fragment or variant of any of these sequences, preferably according to SEQ ID NO: 433, or a fragment or variant thereof, which is complexed with a cationic or polycationic compound as described herein, preferably with the disulfide-crosslinked peptide Cys-Arg₁₂-Cys (SEQ ID NO: 579). Most preferably, the isRNA in this consists of an RNA sequence according to SEQ ID NO: 433, or a fragment or variant thereof, which is complexed with the disulfide-crosslinked peptide Cys-Arg₁₂-Cys (SEQ ID NO: 579).

[0982] The treatment preferably comprises intratumoral administration of the isRNA as described above (or a pharmaceutical composition comprising said isRNA, respectively) to a subject suffering from a disease selected from the group consisting of
[0983] melanoma, preferably advanced and/or metastatic melanoma, more preferably advanced cutaneous melanoma (cMEL);
[0984] squamous cell cancer (SCC) of the skin, preferably unresectable and/or advanced SCC of the skin, more preferably cutaneous squamous cell carcinoma (cSCC), even more preferably unresectable and/or advanced cSCC;
[0985] squamous cell carcinoma of the head and neck (HNSCC), preferably advanced HNSCC, more preferably immunotherapy-refractory or platinum-refractory HNSCC, even more preferably immunotherapy-refractory advanced HNSCC or platinum-refractory advanced HNSCC;
[0986] adenocystic carcinoma (ACC), preferably advanced ACC;
[0987] cutaneous T-cell lymphoma, preferably advanced cutaneous T-cell lymphoma or cutaneous T-cell lymphoma of mycosis fungoides subtype, more preferably cutaneous T-cell lymphoma refractory to local treatment or to chemotherapy, even more preferably advanced cutaneous T-cell lymphoma refractory to local treatment or to chemotherapy, or cutaneous T-cell lymphoma of mycosis fungoides subtype refractory to local treatment or to chemotherapy, and
[0988] vulvar cancer, preferably vulvar squamous cell cancer (VSCC), more preferably advanced VSCC, even more preferably VSCC refractory to surgery or chemotherapy, most preferably advanced VSCC refractory to surgery or chemotherapy; or

[0989] selected from the group consisting of cutaneous melanoma (cMEL), cutaneous squamous cell carcinoma (cSCC), head and neck squamous cell carcinoma (HNSCC), adenoid cystic carcinoma (ACC), cutaneous T-cell lymphoma, preferably cutaneous T-cell lymphoma of mycosis fungoides subtype, and vulvar squamous cell cancer (VSCC), wherein the disease is preferably at an advanced stage and/or refractory to standard therapy.

[0990] In a preferred embodiment, the subject receiving the treatment suffers from advanced and/or metastatic melanoma, unresectable and/or advanced SCC, unresectable and/or advanced adenocystic carcinoma (ACC), unresectable and/or advanced or cutaneous T-cell lymphoma or advanced and/or platinum-refractory HNSCC. Preferably, the subject has injectable tumor lesions. More preferably, the subject has no other treatment options.

[0991] More preferably, the treatment comprises intratumoral administration of the isRNA as described above (or a pharmaceutical composition comprising said isRNA, respectively) to a subject suffering from advanced melanoma, preferably advanced cutaneous melanoma, who is being treated with a checkpoint inhibitor, preferably as described herein. Most preferably, the subject is treated with a PD-1 or PD-L1 inhibitor, preferably as described herein, more preferably an antagonistic antibody against PD-1 or an antagonistic antibody against PD-L1.

[0992] The treatment preferably comprises intratumoral administration of a single dose of the isRNA as described above (or a pharmaceutical composition comprising said isRNA, respectively) to the subject, either once or repeatedly. In this context, a single dose preferably comprises from 20 μg to 500 μg, more preferably from 50 μg to 350 μg, of the isRNA as described above. In preferred embodiments, a single dose comprises at least 25 μg, 50 μg, 75 μg, 100 μg, 125 μg, 150 μg, 175 μg, 200 μg, 225 μg or at least 250 μg of the isRNA as described above. Most preferably, a single dose comprises about 25 μg, about 50 μg, about 100 μg or about 150 μg of the isRNA as described above.

[0993] The treatment may comprise repeated intratumoral administration to the subject of a single dose of the isRNA as described above (or a pharmaceutical composition comprising said isRNA, respectively), wherein at least 2, 3, 4, 5, 6, 7, 8, 9, 10, 11, 12 or more single doses are preferably administered to the subject and wherein the interval between the administration of two single doses is at least 1, 2, 3, 4, 5, 6, 7, 8, 9, 10, 11, 12, 13 or 14 days. The interval between the administration of two single doses may be constant or may be varied throughout the treatment. For example, the treatment may comprise intratumoral administration of a single dose once weekly for four weeks, followed by further single doses, preferably 3 to 8 further single doses, which are administered every two weeks.

[0994] According to another embodiment, the treatment comprises intratumoral administration of the isRNA as described above (or a pharmaceutical composition comprising said isRNA, respectively) to a subject suffering from a tumor or cancer disease, preferably selected from the group consisting of breast cancer (hormone receptor positive or negative forms); melanoma, preferably advanced and/or metastatic melanoma; squamous cell cancer of the skin (SCC), preferably unresectable and/or advanced SCC, or other forms of malignant skin cancer; adenocystic carcinoma (ACC), preferably advanced ACC; cutaneous T-cell lymphoma, preferably advanced cutaneous T-cell lymphoma; squamous cell carcinoma of the head and neck (HNSCC), preferably advanced HNSCC; salivary gland cancer; nasopharynx cancers; lung cancer or lung metastases of other malignancies; mesothelioma; bladder cancer; thyroid cancer; esophageal and gastric cancer; liver cancer; malignancies with liver metastases; ovarian cancer; cervix cancer; renal cancer; hematological malignancies with injectable lesions like cutaneous T-cell lymphoma; solitary or multiple myeloma; Hodgkin's disease; non-Hodgkin lymphoma with injectable lesions; sarcoma including its various subtypes; glioma grade I-IV; colorectal, rectal and anal cancer, more preferably selected from the group consisting of melanoma, preferably advanced and/or metastatic melanoma, most preferably advanced cutaneous melanoma (cMEL), squamous cell cancer of the skin (SCC), preferably unresectable and/or advanced SCC, most preferably cutaneous squamous cell carcinoma (cSCC), or other forms of malignant skin cancer, adenocystic carcinoma (ACC), preferably advanced ACC, cutaneous T-cell lymphoma, preferably advanced cutaneous T-cell lymphoma, and squamous cell carcinoma of the head and neck (HNSCC), preferably advanced HNSCC, wherein the treatment further comprises administration, preferably intratumorally, of at least one coding RNA as defined herein. In that embodiment, the treatment thus preferably comprises administration of the combination according to the present invention as described herein.

[0995] In that embodiment, the isRNA is preferably as described above and the at least one coding RNA is preferably an mRNA as described herein encoding at least one peptide or protein comprising IL-12, a decoy PD-1 receptor, preferably a soluble PD-1 receptor, CD40L, or an anti-CTLA4 antibody or a fragment or variant of any of these proteins as described herein.

[0996] More preferably, the treatment comprises intratumoral administration of the isRNA as described above (or a pharmaceutical composition comprising said isRNA, respectively) and further comprises administration, preferably intratumorally, of at least three, preferably at least four or five, coding RNAs as described herein, preferably at least three, more preferably at least four or five, mRNAs, wherein

[0997] a first coding RNA comprises a nucleic acid sequence selected from the group consisting of SEQ ID NOs: 285; 296; 307; 318; 329; 340; 351; 362; 373; 384; 395; 406; 430; 469 and 992, or a fragment or variant of any of these sequences,

[0998] a second coding RNA comprises a nucleic acid sequence selected from the group consisting of SEQ ID NOs: 286; 297; 308; 319; 330; 341; 352; 363; 374; 385; 396; 470 and 407, or a fragment or variant of any of these sequences,

[0999] a third coding RNA comprises a nucleic acid sequence selected from the group consisting of SEQ ID NOs: 926-940, or

[1000] a fragment or variant of any of these sequences,

[1001] a fourth coding RNA comprises a nucleic acid sequence selected from the group consisting of SEQ ID NOs: 956-970, or a fragment or variant of any of these sequences, and/or

[1002] optionally, a fifth coding RNA comprises a nucleic acid sequence selected from the group consisting of SEQ ID NOs: 277; 288; 299; 310; 321; 332; 343; 354; 365; 376; 387; 461 and 398, or a fragment or variant of any of these sequences. Therein, the first, second, third, fourth and fifth coding RNAs are preferably formulated separately and administered concomitantly.

[1003] Even more preferably, the treatment comprises intratumoral administration of the isRNA as described above (or a pharmaceutical composition comprising said isRNA, respectively) and further comprises administration, preferably intratumorally, of at least three, preferably of at least four or five, coding RNAs as described herein, preferably at least three, more preferably at least four or five, mRNAs, wherein

[1004] a first coding RNA comprises a nucleic acid sequence selected from the group consisting of SEQ ID NOs: 285; 296; 307; 318; 329; 340; 351; 362; 373; 384; 395; 406; 430; 469 and 992, or a fragment or variant of any of these sequences,

[1005] a second coding RNA comprises a nucleic acid sequence selected from the group consisting of SEQ ID NOs: 286; 297; 308; 319; 330; 341; 352; 363; 374; 385; 396; 470 and 407, or a fragment or variant of any of these sequences,

[1006] a third coding RNA comprises a nucleic acid sequence selected from the group consisting of SEQ ID NOs: 926-940, or

[1007] a fragment or variant of any of these sequences,

[1008] a fourth coding RNA comprises a nucleic acid sequence selected from the group consisting of SEQ ID NOs: 956-970, or a fragment or variant of any of these sequences, and/or

[1009] optionally, a fifth coding RNA comprises a nucleic acid sequence selected from the group consisting of SEQ ID NOs: 277; 288; 299; 310; 321; 332; 343; 354; 365; 376; 387; 461 and 398, or a fragment or variant of any of these sequences. Therein, the first, second, third, fourth and fifth coding RNAs are preferably formulated separately and administered concomitantly.

[1010] Most preferably, the treatment comprises intratumoral administration of the isRNA as described above (or a pharmaceutical composition comprising said isRNA, respectively) and further comprises administration, preferably intratumorally, of at least three, preferably at least four or five, coding RNAs as described herein, preferably at least three, more preferably at least four of five, mRNAs, wherein

[1011] a first coding RNA comprises a nucleic acid sequence selected from the group consisting of SEQ ID NOs: 285; 296; 307; 318; 329; 340; 351; 362; 373; 384; 395; 406; 430; 469 and 992, or a fragment or variant of any of these sequences,

[1012] a second coding RNA comprises a nucleic acid sequence selected from the group consisting of SEQ ID NOs: 286; 297; 308; 319; 330; 341; 352; 363; 374; 385; 396; 470 and 407, or a fragment or variant of any of these sequences,

[1013] a third coding RNA comprises a nucleic acid sequence selected from the group consisting of SEQ ID NOs: 926-940, or

[1014] a fragment or variant of any of these sequences,

[1015] a fourth coding RNA comprises a nucleic acid sequence selected from the group consisting of SEQ ID NOs: 956-970, or a fragment or variant of any of these sequences, and/or

[1016] optionally, a fifth coding RNA comprises a nucleic acid sequence selected from the group consisting of SEQ ID NOs: 277; 288; 299; 310; 321; 332; 343; 354; 365; 376; 387; 461 and 398, or a fragment or variant of any of these sequences. Therein, the first, second, third, fourth and fifth coding RNAs are preferably formulated separately and administered concomitantly.

[1017] Hence, the treatment preferably comprises

[1018] intratumoral administration of an isRNA comprising a nucleic acid sequence according to SEQ ID NOs: 433 to 437, 1014 to 1016 or a fragment or variant of any of these sequences, preferably according to SEQ ID NO: 433 or a fragment or variant thereof, which is complexed with a cationic or polycationic compound as described herein, preferably with the disulfide-crosslinked peptide Cys-Arg₁₂-Cys (SEQ ID NO: 579), and

[1019] intratumoral, peritumoral or locoregional administration of at least five coding RNAs, preferably an mRNA, wherein

[1020] a first coding RNA comprises a nucleic acid sequence selected from the group consisting of SEQ ID NOs: 296; 307; 318; 329; 340; 351; 362; 373; 384; 395; 406; 430 and 992, or a fragment or variant of any of these sequences,

[1021] a second coding RNA comprises a nucleic acid sequence selected from the group consisting of SEQ ID NOs: 297; 308; 319; 330; 341; 352; 363; 374; 385; 396 and 407, or a fragment or variant of any of these sequences,

[1022] a third coding RNA comprises a nucleic acid sequence selected from the group consisting of SEQ ID NOs: 926-940, or

[1023] a fragment or variant of any of these sequences,

[1024] a fourth coding RNA comprises a nucleic acid sequence selected from the group consisting of SEQ ID NOs: 956-970, or a fragment or variant of any of these sequences, and/or

[1025] optionally, a fifth coding RNA comprises a nucleic acid sequence selected from the group consisting of SEQ ID NOs: 288; 299; 310; 321; 332; 343; 354; 365; 376; 387 and 398, or a fragment or variant of any of these sequences,

[1026] wherein the first, second, third, fourth and fifth coding RNAs are preferably formulated separately and administered concomitantly.

[1027] According to an alternative embodiment, the treatment comprises

[1028] intratumoral administration of an isRNA comprising a nucleic acid sequence according to SEQ ID NOs: 433 to 437, 1014 to 1016, 10555 or 1056 or a fragment or variant of any of these sequences, preferably according to SEQ ID NO: 433 or a fragment or variant thereof, which is complexed with a cationic or polycationic compound as described herein, preferably with the disulfide-crosslinked peptide Cys-Arg₁₂-Cys (SEQ ID NO: 579), and

[1029] intratumoral, peritumoral or locoregional administration of at least five coding RNAs, preferably an mRNA, wherein a first coding RNA comprises a nucleic acid sequence selected from the group consisting of SEQ ID NOs: 285; 296; 307; 318; 329; 340; 351; 362; 373; 384; 395; 406; 430; 469 and 992, or a fragment or variant of any of these sequences,

[1030] a second coding RNA comprises a nucleic acid sequence selected from the group consisting of SEQ ID NOs: 286; 297; 308; 319; 330; 341; 352; 363; 374; 385; 396; 470 and 407, or a fragment or variant of any of these sequences,

[1031] a third coding RNA comprises a nucleic acid sequence selected from the group consisting of SEQ ID NOs: 926-940, or

[1032] a fragment or variant of any of these sequences,

[1033] a fourth coding RNA comprises a nucleic acid sequence selected from the group consisting of SEQ ID NOs: 956-970,

[1034] or a fragment or variant of any of these sequences, and/or

[1035] optionally, a fifth coding RNA comprises a nucleic acid sequence selected from the group consisting of SEQ ID NOs: 277; 288; 299; 310; 321; 332; 343; 354; 365; 376; 387; 461 and 398, or a fragment or variant of any of these sequences,

[1036] wherein the first, second, third, fourth and fifth coding RNAs are preferably formulated separately and administered concomitantly.

[1037] Most preferably, the treatment preferably comprises

[1038] Intratumoral, peritumoral or locoregional administration of an isRNA comprising a nucleic acid sequence according to SEQ ID NO: 433 to 437, 1014 to 1016, 1055 or 1056, or a fragment or variant of any of these sequences, preferably according to SEQ ID NO: 433 or a fragment or variant thereof, which is complexed with a cationic or polycationic compound as described herein, preferably with the disulfide-crosslinked peptide Cys-Arg₁₂-Cys (SEQ ID NO: 579), and intratumoral, peritumoral or locoregional administration of at least five coding RNAs, preferably an mRNA, wherein

[1039] a first coding RNA comprises a nucleic acid sequence selected from the group consisting of of SEQ ID NOs: 296; 307; 318; 329; 340; 351; 362; 373; 384; 395; 406; 430 and 992, or a fragment or variant of any of these sequences,

[1040] a second coding RNA comprises a nucleic acid sequence selected from the group consisting of SEQ ID NOs: 297; 308; 319; 330; 341; 352; 363; 374; 385; 396 and 407, or a fragment or variant of any of these sequences,

[1041] a third coding RNA comprises a nucleic acid sequence selected from the group consisting of SEQ ID NOs: 926-940, or

[1042] a fragment or variant of any of these sequences,

[1043] a fourth coding RNA comprises a nucleic acid sequence selected from the group consisting of SEQ ID NOs: 956-970, or a fragment or variant of any of these sequences, and/or

[1044] optionally, a fifth coding RNA comprises a nucleic acid sequence selected from the group consisting of SEQ ID NOs: 288; 299; 310; 321; 332; 343; 354; 365; 376; 387 and 398, or a fragment or variant of any of these sequences,

[1045] wherein the first, second, third, fourth and fifth coding RNAs are preferably formulated separately and administered concomitantly.

[1046] In that embodiment, the isRNA, the dosage regimen of the isRNA and the administration of the isRNA are preferably as described above with respect to the isRNA for use in the treatment of a tumor or cancer disease.

[1047] The dosage regimen and the administration of the at least one coding RNA, which is administered concomitantly with the isRNA as described above, is preferably identical to the dosage regimen and the administration as described above with respect to the isRNA for use in the treatment of a tumor or cancer disease. The treatment thus preferably comprises intratumoral administration of a single dose of the at least one coding RNA as described herein (or a pharmaceutical composition comprising said RNA, respectively) to the subject, either once or repeatedly. In this context, a single dose preferably comprises from 20 μg to 500 μg, more preferably from 50 μg to 350 μg, of the at least one coding RNA as described above. In preferred embodiments, a single dose comprises at least 25 μg, 50 μg, 75 μg, 100 μg, 125 μg, 150 μg, 175 μg, 200 μg, 225 μg or at least 250 μg of the at least one coding RNA as described above. Most preferably, a single dose comprises about 25 μg, about 50 μg, about 100 μg or about 150 μg of the at least one coding RNA as described herein. More preferably, the treatment comprises administration of at least three coding RNAs as described above, wherein a single dose comprises the above indicated amounts of each of the coding RNAs. The treatment preferably comprises repeated administration of a single dose as described above. Preferably, the doses of the at least one coding RNA are administered concomitantly with the isRNA as described above and preferably following the schedule described in that context.

[1048] In a particularly preferred embodiment the subject receiving the isRNA, the at least one coding RNA, the combination thereof or the pharmaceutical composition or vaccine comprising said RNA(s) may be a patient with cancer or tumor who receives or received standard treatments of cancer. Preferably, the patient has achieved partial response or stable disease after having received standard treatments.

[1049] The standard treatments of cancer include chemotherapy, radiation, chemoradiation and surgery dependent on the particular cancer or tumor type to be treated, wherein these treatments are applied individually or in combination.

[1050] In some embodiments, the subject receiving the isRNA, the at least one coding RNA, the combination thereof or the pharmaceutical composition or vaccine comprising said RNA(s) may be a patient with a tumor or cancer disease, preferably as defined herein, more preferably a disease selected from the group consisting of melanoma, preferably advanced and/or metastatic melanoma, most preferably advanced cutaneous melanoma (cMEL), squamous cell cancer of the skin (SCC), preferably unresectable and/or advanced SCC, most preferably cutaneous squamous cell carcinoma (cSCC), or other forms of malignant skin cancer, adenocystic carcinoma (ACC), preferably advanced ACC, cutaneous T-cell lymphoma, preferably advanced cutaneous T-cell lymphoma, and squamous cell carcinoma of the head and neck (HNSCC), preferably advanced HNSCC, who received or receives chemotherapy (e.g. first-line or second-line chemotherapy), radiotherapy, chemoradiation (combination of chemotherapy and radiotherapy), kinase inhibitors, antibody therapy and/or checkpoint modulators (e.g. CTLA4 inhibitors, PD1 pathway inhibitors), or a patient, who has achieved partial response or stable disease after having received one or more of the treatments specified above.

[1051] According to certain embodiments, the subject receiving the isRNA, the at least one coding RNA, the combination thereof or the pharmaceutical composition or vaccine comprising said RNA(s) may be a subject suffering from a disease selected from the group consisting of melanoma, preferably advanced and/or metastatic melanoma, most preferably advanced cutaneous melanoma (cMEL), squamous cell cancer of the skin (SCC), preferably unresectable and/or advanced SCC, most preferably cutaneous squamous cell carcinoma (cSCC), or other forms of malignant skin cancer, adenocystic carcinoma (ACC), preferably advanced ACC, cutaneous T-cell lymphoma, preferably advanced cutaneous T-cell lymphoma, and squamous cell carcinoma of the head and neck (HNSCC), preferably advanced HNSCC, who received or receives, preferably via intratumoral administration, a compound conventionally used in any of these diseases as described herein.

[1052] More preferably, the subject receiving the isRNA, the at least one coding RNA, the combination thereof or the pharmaceutical composition or vaccine comprising said RNA(s) suffers from a disease selected from the group consisting of melanoma, preferably advanced and/or metastatic melanoma, most preferably advanced cutaneous melanoma (cMEL), squamous cell cancer of the skin (SCC), preferably unresectable and/or advanced SCC, most preferably cutaneous squamous cell carcinoma (cSCC), or other forms of malignant skin cancer, adenocystic carcinoma (ACC), preferably advanced ACC, cutaneous T-cell lymphoma, preferably advanced cutaneous T-cell lymphoma, and squamous cell carcinoma of the head and neck (HNSCC), preferably advanced HNSCC, and received or received a checkpoint modulator.

[1053] According to some embodiments, the subject receiving the isRNA, the at least one coding RNA, the combination thereof or the pharmaceutical composition or vaccine comprising said RNA(s) may be a patient with a tumor or cancer disease selected from
[1054] melanoma, preferably advanced and/or metastatic melanoma, more preferably advanced cutaneous melanoma (cMEL);
[1055] squamous cell cancer (SCC) of the skin, preferably unresectable and/or advanced SCC of the skin, more preferably cutaneous squamous cell carcinoma (cSCC), even more preferably unresectable and/or advanced cSCC;
[1056] squamous cell carcinoma of the head and neck (HNSCC), preferably advanced HNSCC, more preferably immunotherapy-refractory or platinum-refractory HNSCC, even more preferably immunotherapy-refractory advanced HNSCC or platinum-refractory advanced HNSCC;
[1057] adenocystic carcinoma (ACC), preferably advanced ACC;
[1058] cutaneous T-cell lymphoma, preferably advanced cutaneous T-cell lymphoma or cutaneous T-cell lymphoma of mycosis fungoides subtype, more preferably cutaneous T-cell lymphoma refractory to local treatment or to chemotherapy, even more preferably advanced cutaneous T-cell lymphoma refractory to local treatment or to chemotherapy, or cutaneous T-cell lymphoma of mycosis fungoides subtype refractory to local treatment or to chemotherapy, and
[1059] vulvar cancer, preferably vulvar squamous cell cancer (VSCC), more preferably advanced VSCC, even more preferably VSCC refractory to surgery or chemotherapy, most preferably advanced VSCC refractory to surgery or chemotherapy; or

[1060] selected from cutaneous melanoma (cMEL), cutaneous squamous cell carcinoma (cSCC), head and neck squamous cell carcinoma (HNSCC), adenoid cystic carcinoma (ACC), cutaneous T-cell lymphoma, preferably cutaneous T-cell lymphoma of mycosis fungoides subtype, and vulvar squamous cell cancer (VSCC),

[1061] wherein the tumor or the cancer disease is preferably at an advanced stage and/or refractory to standard therapy. More preferably, the subject receiving the isRNA, the at least one coding RNA, the combination thereof or the pharmaceutical composition or vaccine comprising said RNA(s) is a patient suffering from a tumor or cancer disease as described herein and who received or receives chemotherapy (e.g. first-line or second-line chemotherapy), radiotherapy, chemoradiation (combination of chemotherapy and radiotherapy), kinase inhibitors, antibody therapy and/or checkpoint modulators (e.g. CTLA4 inhibitors, PD1 pathway inhibitors), or a patient, who has achieved partial response or stable disease after having received one or more of the treatments specified above. More preferably, the subject is a patient suffering from a tumor or cancer disease as described herein and who received or receives, preferably via intratumoral administration, a compound conventionally used in any of these diseases as described herein, more preferably a patient who receives or received, preferably via intratumoral administration, a checkpoint modulator.

[1062] The subject receiving the isRNA, the at least one coding RNA, the combination thereof or the pharmaceutical composition or vaccine comprising said RNA(s) preferably suffers from melanoma, preferably advanced and/or metastatic melanoma, and received or received, preferably via intratumoral administration, at least one of the following treatments:
[1063] checkpoint modulator monotherapy, such as Pembrolizumab, Nivolumab or Ipilimumab;
[1064] checkpoint modulator combination therapy, such as Nivolumab and Ipilimumab;
[1065] combination therapy comprising Dabrafenib and Trametinib, or Vemurafenib and cobimetinib or single agent therapy using Vemurafenib or Dabrafenib;
[1066] high-dose IL-2 treatment;
[1067] Imatinib;
[1068] cytotoxic treatments using compounds such as Dacarbazine, Temozolomide, Paclitaxel, Albumin-bound paclitaxel, Carboplatin/paclitaxel;
[1069] biochemotherapy using compounds such as Decarbazine and/or temozolomide and/or carboplatin with/without vinblastine and/or nitrosourea and/or IL-2 and/or interferon alfa2b.

[1070] The subject receiving the isRNA, the at least one coding RNA, the combination thereof or the pharmaceutical composition or vaccine comprising said RNA(s) preferably suffers from squamous cell carcinoma of the head and neck (HNSCC), preferably advanced HNSCC, and received or received, preferably via intratumoral administration, at least one of the following treatments:
[1071] treatments using single agents, e.g. Cisplatin, Carboplatin, Paclitaxel, Docetaxel, 5-FU, Methotrexate, Cetuximab, Gemcitabine, Capecitabine, Vinorelbine, Afatinib;
[1072] treatments using a combination of agents; such as
[1073] Carboplatin and infusional 5-FU;
[1074] 5-FU and hydroxyurea;
[1075] Cisplatin and paclitaxel;
[1076] Cisplatin and infusional 5-FU;
[1077] Cisplatin and 5-FU;
[1078] Carboplatin and paclitaxel;
[1079] Cisplatin followed by cisplatin and 5-FU;
[1080] Docetaxel and cisplatin and 5-FU;
[1081] Paclitaxel and cisplatin and infusional 5-FU;
[1082] Docetaxel and cisplatin;
[1083] Cisplatin and epirubicin and paclitaxel;
[1084] Cisplatin or carboplatin and 5-FU and cetuximab;
[1085] Cisplatin or carboplatin and docetaxel or paclitaxel;
[1086] Cisplatin and Cetuximab;
[1087] Cisplatin and decetaxel and cetuximab;
[1088] Cisplatin and paclitaxel cetuximab;
[1089] Carboplatin and cetuximab;
[1090] Cisplatin and gemcitabine;
[1091] Gemcitabine and vinorelbine.

[1092] The subject receiving the isRNA, the at least one coding RNA, the combination thereof or the pharmaceutical composition or vaccine comprising said RNA(s) preferably suffers from squamous cell cancer of the skin (SCC), preferably unresectable and/or advanced SCC, and received or received, preferably via intratumoral administration, at least one of the following treatments:
[1093] 5-FU;
[1094] Cisplatin;
[1095] Cisplatin and 5-FU;
[1096] Interferon alpha;
[1097] Cis-retinoic acid;
[1098] Interferon alpha and Cis-retinoic acid and Cisplatin;
[1099] Cetuximab;
[1100] vismodegib;
[1101] Cisplatin and 5-FU and Cetuximab;
[1102] Imiquimod;
[1103] Photodynamic therapy (amino levulinic acid, porfimer sodium);
[1104] Vigorous crytotherapy;
[1105] Electrodesiccation;
[1106] Diclofenac;
[1107] Chemical peel (trichloroacetic acid);
[1108] Cryotherapy and 5-FU and Imiquimod;
[1109] Retinoids (acitretin, isotretinoin);
[1110] Calcineurin inhibitors and/or mTOR inhibitors (rapamycin, temsirolimus, Sirolimus, everolimus, ridaforolimus, Deforolimus);
[1111] cisplatin and/or carboplatin and/or 5-FU and/or Paclitaxel and/or Decetaxel.

[1112] The subject receiving the isRNA, the at least one coding RNA, the combination thereof or the pharmaceutical composition or vaccine comprising said RNA(s) preferably suffers from adenocystic carcinoma (ACC), preferably advanced ACC, and received or received, preferably via intratumoral administration, at least one of the following treatments: treatments using as single agents or in combination
[1113] radiotherapy;
[1114] Cisplatin;
[1115] Paclitaxel;
[1116] Mitoxantron;
[1117] Doxo-/Epirubicin;
[1118] Metothrexate;
[1119] Vinorelbine;
[1120] External-beam radiation therapy.

[1121] The subject receiving the isRNA, the at least one coding RNA, the combination thereof or the pharmaceutical composition or vaccine comprising said RNA(s) preferably suffers from cutaneous T-cell lymphoma, preferably advanced cutaneous T-cell lymphoma or mycosis fungoides subtype T cell lymphoma, and received or received, preferably via intratumoral administration, at least one of the following treatments, treatments using as single agents or in combination
[1122] Corticosteroids;
[1123] Carmustine;
[1124] Nitrogen mustard (mechlorethamine hydrochloride);
[1125] Bexarotene;
[1126] Taxarotene gel;
[1127] Imiquimod;
[1128] phototherapy;
[1129] electron beam therapy (TSEBT);
[1130] Alemtuzumab;
[1131] Retinoids;
[1132] Interferon;
[1133] Vorinostat;
[1134] Romidepsin;
[1135] extracorporeak photopheresis (ECP);
[1136] Methotrexate;
[1137] liposomal doxorubicin;
[1138] Gemcitabine;
[1139] Pentostatin;
[1140] Temozolomide;
[1141] Pralatrexate;
[1142] allogenic cell transplant.

[1143] The subject receiving the isRNA, the at least one coding RNA, the combination thereof or the pharmaceutical composition or vaccine comprising said RNA(s) preferably suffers from vulvar cancer, preferably vulvar squamous cell cancer (VSCC), more preferably advanced VSCC, even more preferably VSCC refractory to surgery or chemotherapy, most preferably advanced VSCC refractory to surgery or chemotherapy, and received or received, preferably via intratumoral administration, at least one of the following treatments, treatments using as single agents or in combination:
[1144] mitomycin-C2;
[1145] cisplatin;
[1146] carboplatin;
[1147] vinorelbine;
[1148] paclitaxel;
[1149] a tyrosine kinase inhibitor (e.g. erlotinib);
[1150] nivolumab;
[1151] bleomycin sulfate (e.g. bleomycin, bleomycin sulfate, blenamax, tevableo, oncobleo, bleo, bloicin-S);
[1152] 5-fluorouracil (5-FU);
[1153] Gardasil 9 (human papillomavirus (9-valent) vaccine);
[1154] omiganan pentahydrochloride;
[1155] alisertib;
[1156] ISA-101 (13 synthetic long peptides (25-35 amino acids long) derived from the E6 and E7 oncogenic proteins of the HPV 16 virus);
[1157] PDS-0101;
[1158] Vicoryx (P16_37-63 vaccine);
[1159] TA-CIN (fusion protein vaccine comprising capsid protein L2, E6 and E7 from HPV16); and
[1160] human papillomavirus 16 E6 peptide vaccine.

### BRIEF DESCRIPTION OF THE FIGURES

[1161] The examples and figures shown in the following are merely illustrative and shall describe the present invention in a further way. These figures and examples shall not be construed to limit the present invention thereto.

[1162] FIG. 1: Panel (A) shows an analysis of the median tumor growth of Balb/C mice bearing CT26 tumors after intratumoral treatment with RNAdjuvant, mRNA encoding IL-12 and mRNA-encoded soluble PD-1.

[1163] Respective combinations of these compounds, including control groups, were tested as indicated in the figure. The experiment was performed as described in Example 1.

[1164] Panel (B) shows survival proportions of mice bearing CT26 tumors after intratumoral treatment with RNAdjuvant, mRNA encoding IL-12 and mRNA encoded soluble PD-1. Respective combinations of these compounds, including control groups, were tested as indicated in the figure. The experiment was performed as described in Example 1. Kaplan-Meier survival curves are presented.

[1165] FIG. 2: shows survival proportions of Balb/C mice bearing CT26 tumors after intratumoral treatment with RNAdjuvant and intraperitoneal treatment of an anti-PD-1 antibody. Respective combinations of these compounds, including control groups, were tested as indicated in the figure. The experiment was performed as described in Example 2. Kaplan-Meier survival curves are presented.

[1166] FIG. 3: shows survival proportions of Balb/C mice bearing CT26 tumors after intratumoral treatment with RNAdjuvant, mRNA encoding IL-12 and mRNA-encoded CD40L compared to intratumoral treatment with mRNA encoding IL-12 alone. Respective combinations of these compounds, including control groups, were tested as indicated in the figure. The experiment was performed as described in Example 3. Kaplan-Meier survival curves are presented.

[1167] FIG. 4: shows an analysis of the median tumor growth after re-challenge of Balb/C mice with syngeneic CT26 colon carcinoma cells at day 113 after the first tumor challenge. Mice were previously treated intratumorally with RNAdjuvant alone or in combination with anti-PD1 treatment. Respective combinations of these compounds, including control groups, were tested as indicated in the figure. The experiment was performed as described in Example 4.

[1168] FIG. 5: shows an analysis of the median tumor growth after re-challenge of Balb/C mice with syngeneic CT26 colon carcinoma cells at day 113 after the first tumor challenge. Mice were previously treated intratumorally with RNAdjuvant alone or in combination with an mRNA encoding CD40L and an mRNA-encoded IL-12. Respective combinations of these compounds, including control groups, were tested as indicated in the figure. The experiment was performed as described in Example 5.

[1169] FIG. 6: shows an analysis of the median tumor growth of Balb/C mice bearing CT26 tumors after intratumoral treatment with immunostimulating RNA (RNAdjuvant), mRNA encoding soluble PD1 (solPD1) and CD40 ligand (CD40L) in combination with a checkpoint inhibitor anti CTLA4 antibody. The experiment was performed as described in Example 7.

[1170] FIG. 7: shows an analysis of the median tumor growth of the untreated lesion of Balb/C mice bearing CT26 tumors in both flanks after intratumoral treatment of one lesion with immunostimulating RNA (RNAdjuvant), mRNA encoding soluble PD1 (solPD1) and CD40 ligand (CD40L) in combination with an anti-CTLA4 checkpoint antibody. The experiment was performed as described in Example 8.

[1171] FIG. 8: Panel (A) shows an analysis of the median tumor growth of Balb/C mice bearing E.G7-OVA tumors after intratumoral treatment with immunostimulatory RNAdjuvant and vaccinated i.d. with OVA (RNActive) or in combination with an anti-PD1 checkpoint inhibitor (administered i.p.) and PpLuc RNActive or buffer as unspecific control. The experiment was performed as described in Example 10. Panel (B) shows survival proportions of mice bearing E.G7-OVA tumors after intratumoral treatment with immunostimulatory RNAdjuvant and vaccinated i.d. with OVA (RNActive) or in combination with a checkpoint inhibitor anti PD1 (administered i.p.) and PpLuc RNActive or buffer as unspecific control. The experiment was performed as described in Example 10. Kaplan-Meier survival curves are presented.

[1172] FIG. 9: Panel (A) shows an analysis of the median tumor growth of Balb/C mice bearing E.G7-OVA tumors after intratumoral treatment with immunostimulatory RNAdjuvant and an mRNA encoding IL12 vaccinated i.d. with OVA (RNActive) and PpLuc RNActive or buffer as unspecific control. The experiment was performed as described in Example 11.

[1173] Panel (B) shows survival proportions of mice bearing E.G7-OVA tumors after intratumoral treatment with immunostimulatory RNAdjuvant and an mRNA encoding IL12 vaccinated i.d. with OVA (RNActive) and PpLuc RNActive or buffer as unspecific control. The experiment was performed as described in Example 11. Kaplan-Meier survival curves are presented.

[1174] FIG. 10: Panel (A) shows translated mRNA products of IL12 in the supernantant of RNA transfected A375 cells after 5 hours. The experiment was performed as described in Example 13.

[1175] Panel (B) shows translated mRNA products of IL12 in the supernantant of RNA transfected A375 cells after 24 hours. The experiment was performed as described in Example 13.

[1176] FIG. 11: Panel (A) shows translated mRNA products of solPD1 in the supernantant of RNA transfected A375 cells after 5 hours. The experiment was performed as described in Example 13.

[1177] Panel (B) shows translated mRNA products of solPD1 in the supernantant of RNA transfected A375 cells after 24 hours. The experiment was performed as described in Example 13.

[1178] FIG. 12: Panel (A) shows translated mRNA products of anti-CTLA4 antibody in the supernantant of RNA transfected A375 cells after 5 hours. The experiment was performed as described in Example 13.

[1179] Panel (B) shows translated mRNA products of anti-CTLA4 antibody in the supernantant of RNA transfected A375 cells after 24 hours. The experiment was performed as described in Example 13.

[1180] FIG. 13: shows membrane bound translated mRNA product of CD40LG on transfected A375 cells after 24 hours analyzed by FACS analysis. The experiment was performed as described in Example 13.

### DETAILED DESCRIPTION OF THE INVENTION

[1181] The present invention and preferred embodiments thereof are further described by the following items:
[1182] 1. Immunostimulatory RNA (isRNA) for use in the treatment or prophylaxis of a tumor or cancer disease preferably selected from the group consisting of cutaneous melanoma (cMEL), cutaneous squamous cell carcinoma (cSCC), head and neck squamous cell carcinoma (HNSCC), adenoid cystic carcinoma (ACC), cutaneous T-cell lymphoma, preferably cutaneous T-cell lymphoma of mycosis fungoides subtype, and vulvar squamous cell cancer (VSCC), wherein the tumor or the cancer disease is preferably at an advanced stage and/or refractory to standard therapy.
[1183] 2. The isRNA for use according to item 1, wherein the isRNA is administered intratumorally, including peritumorally or locoregionally.
[1184] 3. The isRNA for use according to item 2, wherein the isRNA is administered by injection.
[1185] 4. The isRNA for use according to any of the preceding items, wherein the isRNA is a non-coding RNA.
[1186] 5. The isRNA for use according to any of the preceding items, wherein the isRNA comprises
   [1187] a nucleic acid sequence according to

(GₗXₘGₙ), formula (I)
[1188] wherein:
[1189] G is guanosine (guanine), uridine (uracil) or an analogue of guanosine (guanine) or uridine (uracil);
[1190] X is guanosine (guanine), (uridine) uracil, adenosine (adenine), thymidine (thymine), cytidine (cytosine) or an analogue of the above-mentioned nucleotides (nucleosides);
[1191] l is an integer from 1 to 40,
[1192] wherein
[1193] when I=1 G is guanosine (guanine) or an analogue thereof,
[1194] when I>1 at least 50% of the nucleotides (nucleosides) are guanosine (guanine) or an analogue thereof;
[1195] m is an integer and is at least 3;
[1196] wherein
[1197] when m=3 X is uridine (uracil) or an analogue thereof,
[1198] when m>3 at least 3 successive uridines (uracils) or analogues of uridine (uracil) occur;
[1199] n is an integer from 1 to 40,
[1200] wherein
[1201] when n=1 G is guanosine (guanine) or an analogue thereof,
[1202] when n>1 at least 50% of the nucleotides (nucleosides) are guanosine (guanine) or an analogue thereof;
[1203] a nucleic acid sequence according to
[1204] formula (II) (CₗXₘCₙ)
[1205] wherein:
[1206] C is cytidine (cytosine), uridine (uracil) or an analogue of cytidine (cytosine) or uridine (uracil);
[1207] X is guanosine (guanine), uridine (uracil), adenosine (adenine), thymidine (thymine), cytidine (cytosine) or an analogue of the above-mentioned nucleotides (nucleosides);
[1208] l is an integer from 1 to 40,
[1209] wherein
[1210] when I=1 C is cytidine (cytosine) or an analogue thereof,
[1211] when I>1 at least 50% of the nucleotides (nucleosides) are cytidine (cytosine) or an analogue thereof;
[1212] m is an integer and is at least 3;
[1213] wherein
[1214] when m=3 X is uridine (uracil) or an analogue thereof,
[1215] when m>3 at least 3 successive uridines (uracils) or analogues of uridine (uracil) occur;
[1216] n is an integer from 1 to 40,
[1217] wherein
[1218] when n=1 C is cytidine (cytosine) or an analogue thereof,
[1219] when n>1 at least 50% of the nucleotides (nucleosides) are cytidine (cytosine) or an analogue thereof;
[1220] a nucleic acid sequence according to

(NᵤGₗXₘGₙNᵥ)ₐ formula (III)
[1221] wherein:
[1222] G is guanosine (guanine), uridine (uracil) or an analogue of guanosine (guanine) or uridine (uracil), preferably guanosine (guanine) or an analogue thereof;
[1223] X is guanosine (guanine), uridine (uracil), adenosine (adenine), thymidine (thymine), cytidine (cytosine), or an analogue of these nucleotides (nucleosides), preferably uridine (uracil) or an analogue thereof;
[1224] N is a nucleic acid sequence having a length of about 4 to 50, preferably of about 4 to 40, more preferably of about 4 to 30 or 4 to 20 nucleic acids, each N independently being selected from guanosine (guanine), uridine (uracil), adenosine (adenine), thymidine (thymine), cytidine (cytosine) or an analogue of these nucleotides (nucleosides);
[1225] a is an integer from 1 to 20, preferably from 1 to 15, most preferably from 1 to 10;
[1226] l is an integer from 1 to 40,
[1227] wherein when I=1, G is guanosine (guanine) or an analogue thereof,
[1228] when I>1, at least 50% of these nucleotides (nucleosides) are guanosine (guanine) or an analogue thereof;
[1229] m is an integer and is at least 3;
[1230] wherein when m=3, X is uridine (uracil) or an analogue thereof, and
[1231] when m>3, at least 3 successive uridines (uracils) or analogues of uridine (uracil) occur;
[1232] n is an integer from 1 to 40,
[1233] wherein when n=1, G is guanosine (guanine) or an analogue thereof,
[1234] when n>1, at least 50% of these nucleotides (nucleosides) are guanosine (guanine) or an analogue thereof;
[1235] u,v may be independently from each other an integer from 0 to 50,
[1236] preferably wherein when u=0, v≥1, or when v=0, u≥1;
[1237] wherein the nucleic acid molecule of formula (III) has a length of at least 50 nucleotides, preferably of at least 100 nucleotides, more preferably of at least 150 nucleotides, even more preferably of at least 200 nucleotides and most preferably of at least 250 nucleotides; and/or
[1238] a nucleic acid sequence according to

(NᵤCₗXₘCₙNᵥ)ₐ formula (IV)
[1239] wherein:
[1240] C is cytidine (cytosine), uridine (uracil) or an analogue of cytidine (cytosine) or uridine (uracil), preferably cytidine (cytosine) or an analogue thereof;
[1241] X is guanosine (guanine), uridine (uracil), adenosine (adenine), thymidine (thymine), cytidine (cytosine) or an analogue of the above-mentioned nucleotides (nucleosides), preferably uridine (uracil) or an analogue thereof;
[1242] N is each a nucleic acid sequence having independent from each other a length of about 4 to 50, preferably of about 4 to 40, more preferably of about 4 to 30 or 4 to 20 nucleic acids, each N independently being selected from guanosine (guanine), uridine (uracil), adenosine (adenine), thymidine (thymine), cytidine (cytosine) or an analogue of these nucleotides (nucleosides);
[1243] a is an integer from 1 to 20, preferably from 1 to 15, most preferably from 1 to 10;
[1244] l is an integer from 1 to 40,
[1245] wherein when I=1, C is cytidine (cytosine) or an analogue thereof,
[1246] when I>1, at least 50% of these nucleotides (nucleosides) are cytidine (cytosine) or an analogue thereof;
[1247] m is an integer and is at least 3;
[1248] wherein when m=3, X is uridine (uracil) or an analogue thereof,
[1249] when m>3, at least 3 successive uridines (uracils) or analogues of uridine (uracil) occur;
[1250] n is an integer from 1 to 40,
[1251] wherein when n=1, C is cytidine (cytosine) or an analogue thereof,
[1252] when n>1, at least 50% of these nucleotides (nucleosides) are cytidine (cytosine) or an analogue thereof.
[1253] u, v may be independently from each other an integer from 0 to 50,
[1254] preferably wherein when u=0, v≥1, or when v=0, u≥1;
[1255] wherein the nucleic acid molecule of formula (V) according to the invention has a length of at least 50 nucleotides, preferably of at least 100 nucleotides, more preferably of at least 150 nucleotides, even more preferably of at least 200 nucleotides and most preferably of at least 250 nucleotides.
[1256] 6. The isRNA for use according to any of the preceding items, wherein the isRNA comprises at least one nucleic acid sequence according to any one of SEQ ID NOs: 433 to 437 or 1014 to 1016, preferably according to any one of SEQ ID NO: 433, 434 or 1014 to 1016, or a fragment or variant of any one of these nucleic acid sequences.
[1257] 7. The isRNA for use according to any of the preceding items, wherein the isRNA is complexed with a cationic or polycationic compound, preferably with a cationic or polycationic polymer, a cationic or polycationic peptide or protein, e.g. protamine, a cationic or polycationic polysaccharide and/or a cationic or polycationic lipid.
[1258] 8. The isRNA for use according to item 7, wherein the cationic or polycationic compound is a polymeric carrier.
[1259] 9. The isRNA for use according to item 8, wherein the polymeric carrier is formed by a disulfide-crosslinked cationic component, preferably a disulfide-crosslinked cationic peptide, wherein the disulfide-crosslinked cationic peptide preferably comprises
   [1260] a peptide according to formula V

(Arg)ₗ;(Lys)ₘ;(His)ₙ;(Orn)ₒ;(Xaa)ₓ, (formula (V),
[1261] wherein l+m+n+o+x=8-15, and l, m, n or o independently of each other may be any number selected from 0, 1, 2, 3, 4, 5, 6, 7, 8, 9, 10, 11, 12, 13, 14 or 15, provided that the overall content of Arg, Lys, His and Orn represents at least 50% of all amino acids of the oligopeptide; and Xaa may be any amino acid selected from native (=naturally occurring) or non-native amino acids except of Arg, Lys, His or Orn; and x may be any number selected from 0, 1, 2, 3 or 4, provided, that the overall content of Xaa does not exceed 50% of all amino acids of the oligopeptide;
[1262] a peptide according to formula Va

{(Arg)ₗ;(Lys)ₘ;(His)ₙ;(Orn)ₒ;(Xaa′)ₓ(Cys)_{y}} formula (Va),
[1263] wherein (Arg)ₗ;(Lys)ₘ;(His)ₙ;(Orn)ₒ; and x are as defined for formula V, Xaa′ is any amino acid selected from native (=naturally occurring) or non-native amino acids except of Arg, Lys, His, Orn or Cys and y is any number selected from 0, 1, 2, 3, 4, 5, 6, 7, 8, 9, 10, 11, 12, 13, 14, 15, 16, 17, 18, 19, 20, 21-30, 31-40, 41-50, 51-60, 61-70, 71-80 and 81-90, provided that the overall content of Arg (Arginine), Lys (Lysine), His (Histidine) and Orn (Ornithine) represents at least 10% of all amino acids of the oligopeptide;
[1264] a peptide according to formula Vb

Cys1{(Arg)ₗ;(Lys)ₘ;(His)ₙ;(Orn)ₒ;(Xaa)ₓ}Cys2 formula (Vb)
[1265] wherein empirical formula {(Arg)ₗ;(Lys)ₘ;(His)ₙ;(Orn)ₒ;(Xaa)ₓ} is as defined for formula (V) and forms a core of an amino acid sequence according to (semiempirical) formula (V) and wherein Cys1 and Cys2 are cysteines proximal to, or terminal to (Arg)ₗ;(Lys)ₘ;(His)ₙ;(Orn)ₒ;(Xaa)ₓ; and/or
[1266] a compound according to formula VI

L-P¹—S—[S—P²—S]ₙ—S—P³-L formula (VI)
[1267] wherein,
   [1268] P¹ and P³ are different or identical to each other and represent a linear or branched hydrophilic polymer chain, each P¹ and P³ exhibiting at least one —SH-moiety, capable to form a disulfide linkage upon condensation with component P², or alternatively with (AA), (AA)ₓ, or [(AA)ₓ]_{z} if such components are used as a linker between P¹ and P² or P³ and P² and/or with further components (e.g. (AA), (AA)ₓ, [(AA)ₓ]_{z} or L), the linear or branched hydrophilic polymer chain selected independent from each other from polyethylene glycol (PEG), poly-N-(2-hydroxypropyl)methacrylamide, poly-2-(methacryloyloxy)ethyl phosphorylcholines, poly(hydroxyalkyl L-asparagine), poly(2-(methacryloyloxy)ethyl phosphorylcholine), hydroxyethylstarch or poly(hydroxyalkyl L-glutamine), wherein the hydrophilic polymer chain exhibits a molecular weight of about 1 kDa to about 100 kDa, preferably of about 2 kDa to about 25 kDa; or more preferably of about 2 kDa to about 10 kDa, e.g. about 5 kDa to about 25 kDa or 5 kDa to about 10 kDa;
   [1269] P2 is a cationic or polycationic peptide or protein, e.g. as defined above for the polymeric carrier formed by disulfide-crosslinked cationic components, and preferably having a length of about 3 to about 100 amino acids, more preferably having a length of about 3 to about 50 amino acids, even more preferably having a length of about 3 to about 25 amino acids, e.g. a length of about 3 to 10, 5 to 15, 10 to 20 or 15 to 25 amino acids, more preferably a length of about 5 to about 20 and even more preferably a length of about 10 to about 20;
      [1270] or
      [1271] is a cationic or polycationic polymer, e.g. as defined above for the polymeric carrier formed by disulfide-crosslinked cationic components, typically having a molecular weight of about 0.5 kDa to about 30 kDa, including a molecular weight of about 1 kDa to about 20 kDa, even more preferably of about 1.5 kDa to about 10 kDa, or having a molecular weight of about 0.5 kDa to about 100 kDa, including a molecular weight of about 10 kDa to about 50 kDa, even more preferably of about 10 kDa to about 30 kDa;
      [1272] each P² exhibiting at least two —SH-moieties, capable to form a disulfide linkage upon condensation with further components P² or component(s) P′ and/or P³ or alternatively with further components (e.g. (AA), (AA)ₓ, or [(AA)ₓ]_{z});
   [1273] —S—S— is a (reversible) disulfide bond (the brackets are omitted for better readability), wherein S preferably represents sulphur or a —SH carrying moiety, which has formed a (reversible) disulfide bond. The (reversible) disulfide bond is preferably formed by condensation of —SH-moieties of either components P¹ and P², P² and P², or P² and P³, or optionally of further components as defined herein (e.g. L, (AA), (AA)ₓ, [(AA)ₓ]_{z}, etc); The —SH-moiety may be part of the structure of these components or added by a modification as defined below;
   [1274] L is an optional ligand, which may be present or not, and may be selected independent from the other from RGD, Transferrin, Folate, a signal peptide or signal sequence, a localization signal or sequence, a nuclear localization signal or sequence (NLS), an antibody, a cell penetrating peptide, (e.g. TAT or KALA (SEQ ID NO: 1063)), a ligand of a receptor (e.g. cytokines, hormones, growth factors etc), small molecules (e.g. carbohydrates like mannose or galactose or synthetic ligands), small molecule agonists, inhibitors or antagonists of receptors (e.g. RGD peptidomimetic analogues), or any further protein as defined herein, etc.;
   [1275] n is an integer, typically selected from a range of about 1 to 50, preferably from a range of about 1, 2 or 3 to 30, more preferably from a range of about 1, 2, 3, 4, or 5 to 25, or a range of about 1, 2, 3, 4, or 5 to 20, or a range of about 1, 2, 3, 4, or 5 to 15, or a range of about 1, 2, 3, 4, or 5 to 10, including e.g. a range of about 4 to 9, 4 to 10, 3 to 20, 4 to 20, 5 to 20, or 10 to 20, or a range of about 3 to 15, 4 to 15, 5 to 15, or 10 to 15, or a range of about 6 to 11 or 7 to 10. Most preferably, n is in a range of about 1, 2, 3, 4, or 5 to 10, more preferably in a range of about 1, 2, 3, or 4 to 9, in a range of about 1, 2, 3, or 4 to 8, or in a range of about 1, 2, or 3 to 7.
[1276] 10. The isRNA for use according to item 8 or 9, wherein the polymeric carrier comprises at least one of the disulfide-crosslinked cationic peptides Cys-Arg₁₂ (SEQ ID NO: 580) or Cys-Arg₁₂-Cys (SEQ ID NO: 579).
[1277] 11. The isRNA for use according to any of items 7 to 10, wherein the N/P ratio of the isRNA to the cationic or polycationic compound, preferably the cationic or polycationic peptide or protein, is in the range of about 0.1 to 10, including a range of about 0.3 to 4, of about 0.5 to 2, of about 0.7 to 2 and of about 0.7 to 1.5.
[1278] 12. The isRNA for use according to any of the preceding items, wherein the isRNA is complexed with one or more lipids, thereby forming liposomes, lipid nanoparticles and/or lipoplexes.
[1279] 13. The isRNA for use according to any of the preceding items, wherein the treatment comprises administration of at least one additional pharmaceutically active ingredient.
[1280] 14. The isRNA for use according to item 13, wherein the at least one additional pharmaceutically active ingredient is a compound that is used in the treatment of a tumor or cancer disease preferably selected from the group consisting of cutaneous melanoma (cMEL), cutaneous squamous cell carcinoma (cSCC), head and neck squamous cell carcinoma (HNSCC), adenoid cystic carcinoma (ACC), cutaneous T-cell lymphoma, preferably cutaneous T-cell lymphoma of mycosis fungoides subtype, and vulvar squamous cell cancer (VSCC), wherein the tumor or the cancer disease is preferably at an advanced stage and/or refractory to standard therapy.
[1281] 15. The isRNA for use according to item 13 or 14, wherein the at least one additional pharmaceutically active ingredient is a checkpoint modulator, or a fragment or variant thereof.
[1282] 16. The isRNA for use according to item 15, wherein the checkpoint modulator is selected from the group consisting of a PD-1 inhibitor, a PD-L1 inhibitor, a PD-L2 inhibitor a CTLA-4 inhibitor, a LAG3 inhibitor, a TIM3 inhibitor, a TIGIT inhibitor an OX40 stimulator, a 4-1BB stimulator, a CD40L stimulator, a CD28 stimulator and a GITR stimulator, or a fragment or variant of any one of these checkpoint modulators.
[1283] 17. The isRNA for use according to item 16, wherein the checkpoint modulator is a PD-1 inhibitor or a PD-L1 inhibitor, wherein the PD-1 inhibitor is preferably an antagonistic antibody directed against PD-1 and the PD-L1 inhibitor is an antagonistic antibody directed against PD-L1, or a fragment or variant of said antibody.
[1284] 18. The isRNA for use according to item 16, wherein the checkpoint modulator is a CTLA-4 inhibitor, preferably an anti-CTLA4 antibody, or a fragment or variant thereof.
[1285] 19. The isRNA for use according to item 13 or 14, wherein the at least one additional pharmaceutically active ingredient is an interleukin, preferably IL-12, or a fragment or variant thereof.
[1286] 20. The isRNA for use according to any of items 1 to 19, wherein the treatment comprises administration of at least one coding RNA, preferably at least one mRNA.
[1287] 21. The isRNA for use according to item 20, wherein the at least one coding RNA comprises at least one coding sequence encoding at least one peptide or protein comprising at least one peptide or protein selected from the group consisting of
   [1288] IL-12,
   [1289] CD40L,
   [1290] a decoy PD-1 receptor, and
   [1291] an anti-CTLA4 antibody,
[1292] or a fragment or variant of any of these.
[1293] 22. The isRNA for use according to item 20 or 21, wherein the at least one coding RNA comprises at least one coding sequence encoding a peptide or protein comprising IL-12 or a fragment or variant thereof, or an IL-12 analog, or a fragment or variant thereof.
[1294] 23. The isRNA for use according to item 20 or 21, wherein the at least one coding RNA comprises at least one coding sequence encoding a peptide or protein comprising CD40L or a fragment or variant thereof.
[1295] 24. The isRNA for use according to item 20 or 21, wherein the at least one coding RNA comprises at least one coding sequence encoding a peptide or protein comprising a decoy PD-1 receptor or a fragment or variant thereof.
[1296] 25. The isRNA for use according to item 20 or 21, wherein the at least one coding RNA comprises at least one coding sequence encoding a peptide or protein comprising an anti-CTLA4 antibody, or a fragment or variant thereof.
[1297] 26. The isRNA for use according to item 20 or 21, wherein
   [1298] the at least one coding RNA comprises at least one coding sequence encoding a peptide or protein comprising CD40L or a fragment or variant thereof and
   [1299] the same or a different coding RNA comprises at least one coding sequence encoding a peptide or protein comprising IL-12 or a fragment or variant thereof.
[1300] 27. The isRNA for use according to item 20 or 21, wherein
   [1301] the at least one coding RNA comprises at least one coding sequence encoding a peptide or protein comprising CD40L or a fragment or variant thereof, and
   [1302] the same or a different coding RNA comprises at least one coding sequence encoding a peptide or protein comprising a decoy PD-1 receptor or a fragment or variant thereof.
[1303] 28. The isRNA for use according to item 20 or 21, wherein
   [1304] the at least one coding RNA comprises at least one coding sequence encoding a peptide or protein comprising IL-12 or a fragment or variant thereof, and
   [1305] the same or a different coding RNA comprises at least one coding sequence encoding a peptide or protein comprising a decoy PD-1 receptor or a fragment or variant thereof.
[1306] 28. The isRNA for use according to item 20 or 21, wherein
   [1307] the at least one coding RNA comprises at least one coding sequence encoding a peptide or protein comprising IL-12 or a fragment or variant thereof, and
   [1308] the same or a different coding RNA comprises at least one coding sequence encoding a peptide or protein comprising at least one tumor antigen or a fragment or variant thereof.
[1309] 29. The isRNA for use according to item 20 or 21, wherein
   [1310] the at least one coding RNA comprises at least one coding sequence encoding a peptide or protein comprising CD40L or a fragment or variant thereof, and
   [1311] the same or a different coding RNA comprises at least one coding sequence encoding a peptide or protein comprising an anti-CTLA4 antibody, or a fragment or variant thereof.
[1312] 30. The isRNA for use according to item 20 or 21, wherein
   [1313] the at least one coding RNA comprises at least one coding sequence encoding a peptide or protein comprising IL-12 or a fragment or variant thereof, and
   [1314] the same or a different coding RNA comprises at least one coding sequence encoding a peptide or protein comprising an anti-CTLA4 antibody, or a fragment or variant thereof.
[1315] 31. The isRNA for use according to item 20 or 21, wherein
   [1316] the at least one coding RNA comprises at least one coding sequence encoding a peptide or protein comprising a decoy PD-1 receptor or a fragment or variant thereof, and
   [1317] the same or a different coding RNA comprises at least one coding sequence encoding a peptide or protein comprising an anti-CTLA4 antibody, or a fragment or variant thereof.
[1318] 32. The isRNA for use according to item 20 or 21, wherein
   [1319] the at least one coding RNA comprises at least one coding sequence encoding a peptide or protein comprising IL-12 or a fragment or variant thereof,
   [1320] the same or a different coding RNA comprises at least one coding sequence encoding a peptide or protein comprising CD40L or a fragment or variant thereof, and
   [1321] the same or a different coding RNA comprises at least one coding sequence encoding a peptide or protein comprising an anti-CTLA4 antibody, or a fragment or variant thereof.
[1322] 33. The isRNA for use according to item 20 or 21, wherein
   [1323] the at least one coding RNA comprises at least one coding sequence encoding a peptide or protein comprising IL-12 or a fragment or variant thereof,
   [1324] the same or a different coding RNA comprises at least one coding sequence encoding a peptide or protein comprising CD40L or a fragment or variant thereof,
   [1325] the same or a different coding RNA comprises at least one coding sequence encoding a peptide or protein comprising an anti-CTLA4 antibody, or a fragment or variant thereof, and
   [1326] optionally, the same or a different coding RNA comprises at least one coding sequence encoding a peptide or protein comprising a decoy PD-1 receptor or a fragment or variant thereof.
[1327] 34. The isRNA for use according to any of items 1 to 33, wherein the subject does not receive or has not received a treatment with a PD-1 or PD-L1 antagonist and wherein the use comprises administration of at least one peptide or protein comprising a decoy PD-1 receptor or a fragment or variant thereof, or administration of a nucleic acid, preferably a coding RNA, more preferably an mRNA, comprising a nucleic acid sequence encoding at least one peptide or protein comprising a decoy PD-1 receptor or a fragment or variant thereof.
[1328] 35. The isRNA for use according to any of items 1 to 34, wherein the subject receives or has received a treatment with a PD-1 or a PD-L1 antagonist and wherein the use does not comprise administration of at least one peptide or protein comprising a decoy PD-1 receptor or a fragment or variant thereof, or administration of a nucleic acid, preferably a coding RNA, more preferably an mRNA, comprising a nucleic acid sequence encoding at least one peptide or protein comprising a decoy PD-1 receptor or a fragment or variant thereof.
[1329] 36. The isRNA for use according to item 33, wherein each coding sequence encoding a peptide or protein is located on a separate coding RNA, preferably a separate mRNA.
[1330] 37. The isRNA for use according to item 33, wherein at least two of the coding sequences encoding a peptide or protein are located on the same coding RNA, which is preferably a bi- or multicistronic RNA.
[1331] 38. The isRNA for use according to any of items 20 to 37, wherein the at least one coding RNA is administered intratumorally.
[1332] 39. The isRNA for use according to any of items 20 to 38, wherein the at least one coding RNA is administered intradermally, intramuscularly or subcutaneously.
[1333] 40. The isRNA for use according to item 36, wherein the separate coding RNAs are formulated together and administered intratumorally.
[1334] 41. The isRNA for use according to any of items 20 to 40, wherein the isRNA is formulated together with the at least one coding RNA.
[1335] 42. The isRNA for use according to item 37, wherein the co-formulation is administered intratumorally.
[1336] 43. The isRNA for use according to any of items 20 to 42, wherein the at least one coding RNA comprises at least one coding sequence encoding a peptide or protein comprising IL-12, preferably at least one of IL-12A or IL-12B, or a fragment or variant of any of these proteins.
[1337] 44. The isRNA for use according to item 43, wherein the encoded peptide or protein comprises an amino acid sequence selected from the group consisting of SEQ ID NO: 3 to 8, or a fragment or variant of any of these sequences.
[1338] 45. The isRNA for use according to item 43 or 44, wherein the at least one coding sequence comprises a nucleic acid sequence selected from the group consisting of SEQ ID NOs: 440 to 445 or a fragment or variant of any of these sequences.
[1339] 46. The isRNA for use according to any of items 43 to 45, wherein the encoded peptide or protein comprises IL-12A and IL-12B or a fragment or variant of each of these proteins.
[1340] 47. The isRNA for use according to item 46, wherein the encoded peptide or protein comprises an amino acid sequence according to SEQ ID NO: 10 or a fragment or variant thereof.
[1341] 48. The isRNA for use according to any of items 43 to 47, wherein the at least one coding sequence comprises a nucleic acid sequence according to SEQ ID NO: 447 or a fragment or variant thereof.
[1342] 49. The isRNA for use according to any of items 20 to 48, wherein the at least one coding RNA comprises at least one coding sequence encoding a peptide or protein comprising CD40L or a fragment or variant thereof, wherein the encoded peptide or protein preferably comprises an amino acid sequence according to SEQ ID NO: 11 or a fragment or variant thereof.
[1343] 50. The isRNA for use according to item 49, wherein the at least one coding sequence comprises a nucleic acid sequence according to SEQ ID NO: 448 or a fragment or variant thereof.
[1344] 51. The isRNA for use according to any of items 20 to 50, wherein the at least one coding RNA comprises at least one coding sequence encoding a peptide or protein comprising a decoy PD-1 receptor or a fragment or variant thereof, preferably the extracellular part of a PD-1 receptor or a fragment or variant thereof.
[1345] 52. The isRNA for use according to item 51, wherein the decoy PD-1 receptor is a peptide or protein comprising soluble PD-1 or a fragment or variant thereof.
[1346] 53. The isRNA for use according to item 51 or 52, wherein the encoded peptide or protein comprises an amino acid sequence according to SEQ ID NO: 2 or 1042, or a fragment or variant thereof.
[1347] 54. The isRNA for use according to any of items 51 to 53, wherein the at least one coding sequence comprises a nucleic acid sequence according to SEQ ID NO: 439 or a fragment or variant thereof.
[1348] 55. The isRNA for use according to any of items 20 to 54, wherein the at least one coding RNA comprises at least one coding sequence encoding a peptide or protein comprising an anti-CTLA4 antibody or a fragment or variant thereof.
[1349] 56. The isRNA for use according to item 55, wherein the encoded peptide or protein comprises an amino acid sequence according to SEQ ID NO: 645 and/or 677, or a fragment or variant of any of these amino acid sequences.
[1350] 57. The isRNA for use according to item 55 or 56, wherein the at least one coding sequence comprises a nucleic acid sequence according to SEQ ID NO: 646 and/or 678, or a fragment or variant of any of these nucleic acid sequences.
[1351] 58. The isRNA for use according to items 20 to 57, wherein the at least one coding RNA comprises at least one coding sequence encoding a peptide or protein comprising at least one tumor antigen, or a fragment or variant of a tumor antigen.
[1352] 59. The isRNA for use according to item 58, wherein the tumor antigen is preferably selected from the group consisting of 1A01_HLA-A/m; 1A02; 5T4; ACRBP; AFP; AKAP4; alpha-actinin-_4/m; alpha-methylacyl-coenzyme_A_racemase; ANDR; ART-4; ARTC1/m; AURKB; B2MG; B3GN5; B4GN1; B7H4; BAGE-1; BASI; BCL-2; bcr/abl; beta-catenin/m; BING-4; BIRC7; BRCA1/m; BY55; calreticulin; CAMEL; CASP-8/m; CASPA; cathepsin_B; cathepsin_L; CD1A; CD1B; CD1C; CD1D; CD1E; CD20; CD22; CD276; CD33; CD3E; CD3Z; CD44_Isoform_1; CD44_Isoform_6; CD4; CD52; CD55; CD56; CD80; CD86; CD8A; CDC27/m; CDE30; CDK4/m; CDKN2A/m; CEA; CEAM6; CH3L2; CLCA2; CML28; CML66; COA-1/m; coactosin-like_protein; collagen_MII; COX-2; CP1B1; CSAG2; CT45A1; CT55; CT-_9/BRD6; CTAG2_Isoform_LAGE-1A; CTAG2_Isoform_LAGE-1B; CTCFL; Cten; cyclin_B1; cyclin_D1; cyp-B; DAM-10; DEP1A; E7; EF1A2; EFTUD2/m; EGFR; EGLN3; ELF2/m; EMMPRIN; EpCam; EphA2; EphA3; ErbB3; ERBB4; ERG; ETV6; EWS; EZH2; FABP7; FCGR3A_Version_1; FCGR3A_Version_2; FGF5; FGFR2; fibronectin; FOS; FOXP3; FUT1; G250; GAGE-1; GAGE-2; GAGE-3; GAGE-4; GAGE-5; GAGE-6; GAGE7b; GAGE-8_(GAGE-2D); GASR; GnT-V; GPC3; GPNMB/m; GRM3; HAGE; hepsin; Her2/neu; HLA-A2/m; homeobox_NKX3.1; HOM-TES-85; HPG1; HS71A; HS71B; HST-2; hTERT; iCE; IF2B3; IL10; IL-13Ra2; IL2-RA; IL2-RB; IL2-RG; IL-5; IMP3; ITA5; ITB1; ITB6; kallikrein-2; kallikrein-3; kallikrein-4; KI20A; KIAA0205; KIF2C; KK-LC-1; LDLR; LGMN; LIRB2; LY6K; MAGA5; MAGA8; MAGAB; MAGE-A10; MAGE-Al2; MAGE-A1; MAGE-A2; MAGE-A3; MAGE-A4; MAGE-A6; MAGE-A9; MAGE-B10; MAGE-B16; MAGE-B17; MAGE-_B1; MAGE-B2; MAGE-B3; MAGE-B4; MAGE-B5; MAGE-B6; MAGE-C1; MAGE-C2; MAGE-C3; MAGE-D1; MAGE-D2; MAGE-D4; MAGE-_E1; MAGE-E1_(MAGE1); MAGE-E2; MAGE-F1; MAGE-H₁; MAGEL2; mammaglobin_A; MART-1/melan-A; MART-2; MC1_R; M-CSF; mesothelin; MITF; MMP1_1; MMP7; MUC-1; MUM-1/m; MUM-2/m; MYCN; MYO1A; MYO1B; MYO1C; MYO1Da MYO1E; MYO1F; MYO1G; MYO1H; NA17; NA88-A; Neo-PAP; NFYC/m; NGEP; NPM; NRCAM; NSE; NUF2; NY-ESO-1; OA1; OGT; OS-9; osteocalcin; osteopontin; p53; PAGE-4; PAI-1; PAI-2; PAP; PATE; PAX3; PAXS; PD1L1; PDCD1; PDEF; PECA1; PGCB; PGFRB; Pim-1_-Kinase; Pin-1; PLAC1; PMEL; PML; POTEF; POTE; PRAME; PRDX5/m; PRM2; prostein; proteinase-3; PSA; PSB9; PSCA; PSGR; PSM; PTPRC; RAB8A; RAGE-1; RARA; RASH; RASK; RASN; RGSS; RHAMM/CD168; RHOC; RSSA; RU1; RU2; RUNX1; S-100; SAGE; SART-_1; SART-2; SART-3; SEPR; SERPINBS; SIA7F; SIA8A; SIAT9; SIRT2/m; SOX10; SP17; SPNXA; SPXN3; SSX-1; SSX-2; SSX3; SSX-4; ST1A1; STAG2; STAMP-1; STEAP-1; Survivin-2B; survivin; SYCP1; SYT-SSX-1; SYT-SSX-2; TARP; TCRg; TF2AA; TGFB1; TGFR2; TGM-4; TIE2; TKTL1; TPI/m; TRGV11; TRGV9; TRPC1; TRP-p8; TSG10; TSPY1; TVC_(TRGV3); TX101; tyrosinase; TYRP1; TYRP2; UPA; VEGFR1; WT1; and XAGE1.
[1353] 60. The isRNA for use according to item 58 or 59, wherein the encoded peptide or protein comprises an amino acid sequence selected from the group consisting of SEQ ID NOs: 1-504; 4558-4560 of PCT/EP2017/059525, or a fragment or variant of any of these sequences.
[1354] 61. The isRNA for use according to any of items 58 to 60, wherein the at least one coding sequence of the at least one coding RNA comprises a nucleic acid sequence selected from the group consisting of SEQ ID NOs: 505-4033; 4561-4591 of PCT/EP2017/059525, or a fragment or variant of any of these sequences.
[1355] 62. The isRNA for use according to any of items 58 to 61, wherein the at least one coding RNA is not administered intratumorally.
[1356] 63. The isRNA for use according to any of items 58 to 62, wherein the at least one coding RNA is administered intradermally, intramuscularly or subcutaneously.
[1357] 64. The isRNA for use according to any of items 20 to 63, wherein the at least one coding RNA comprises at least one coding sequence comprising a nucleic acid sequence that is modified compared to the nucleic acid sequence of the coding sequence of the corresponding wild type RNA, and wherein the amino acid sequence encoded by said coding sequence is preferably not modified compared to the amino acid sequence encoded by the coding sequence of the corresponding wild type RNA.
[1358] 65. The isRNA for use according to item 64, wherein the at least one coding sequence comprises
   [1359] a) a nucleic acid sequence selected from the group consisting of SEQ ID NOs: 25-30; 36-41; 47-52; 58-63; 69-74; 80-85; 91-96; 102-107; 113-118; 124-129; 135-140; 601-606; 612-617; 623-628; 716-725; 727; 1018-1021 and 1059-1062, or a fragment or variant of any of these sequences, preferably from the group consisting of 32; 43; 54; 65; 76; 87; 98; 109; 120; 131; 142; 608; 619; 630; 632-644; 726 and 1058, or a fragment or variant of any of these sequences;
   [1360] b) a nucleic acid sequence selected from the group consisting of SEQ ID NOs: 33; 44; 55; 66; 77; 88; 99; 110; 121; 132; 143; 609; 620; 631; 728-738 and 1025-1028, or a fragment or variant of any of these sequences,
   [1361] c) a nucleic acid sequence selected from the group consisting of SEQ ID NO: 646-660; 662-676; 678-692; 694-705; 707-715 and 1029-1041, or a fragment or variant of any of these nucleic acid sequences, and/or
   [1362] d) optionally, a nucleic acid sequence selected from the group consisting of SEQ ID NOs: 23; 34; 45; 56; 67; 78; 89; 100; 111; 122; 133; 599; 610; 621 and 1022-1024, or a fragment or variant of any of these sequences, preferably from the group consisting of SEQ ID NOs: 24; 35; 46; 57; 68; 79; 90; 101; 112; 123; 134; 600; 611; 622 and 1043-1054, or a fragment or variant of any of these sequences.
[1363] 66. The isRNA for use according to any of items 20 to 65, wherein the at least one coding RNA comprises at least one coding sequence having a modified, preferably an increased, G/C content compared to the G/C content of the coding sequence of the corresponding wild type RNA, and wherein the amino acid sequence encoded by said coding sequence is preferably not modified compared to the amino acid sequence encoded by the coding sequence of the corresponding wild type RNA.
[1364] 67. The isRNA for use according to item 66, wherein the at least one coding sequence comprises
   [1365] a) a nucleic acid sequence selected from the group consisting of SEQ ID NOs: 25-30; 80-85; 91-96; 102-107; 113-118; 601-606; 124-129; 135-140; 612-617; 623-628; 716-725; 727 and 1018-1021 and 1059-1062, or a fragment or variant of any of these sequences, preferably from the group consisting of SEQ ID NOs: 32; 87; 98; 109; 120; 131; 142; 608; 619; 630; 632; 636-644 and 726 and 1058, or a fragment or variant of any of these sequences;
   [1366] b) a nucleic acid sequence selected from the group consisting of SEQ ID NOs: 33; 88; 99; 110; 121; 132; 143; 609; 620; 631; 728-738 and 1025-1028, or a fragment or variant of any of these sequences,
   [1367] c) a nucleic acid sequence selected from the group consisting of SEQ ID NOs: 646; 650-658; 662; 666-674; 678; 682-690; 694; 698-705; 707; 710; 713 and 1029-1041, or a fragment or variant of any of these nucleic acid sequences, and/or
   [1368] d) optionally, a nucleic acid sequence selected from the group consisting of SEQ ID NOs: 23; 78; 89; 100; 111; 122; 133; 599; 610; 621 and 1022-1024, or a fragment or variant of any of these sequences, preferably from the group consisting of SEQ ID NOs: 24; 79; 90; 101; 112; 123; 134; 600; 611; 622 and 1043-1054, or a fragment or variant of any of these sequences.
[1369] 68. The isRNA for use according to any of items 20 to 67, wherein the at least one coding RNA comprises a 5′-CAP structure.
[1370] 69. The isRNA for use according to any of items 20 to 68, wherein the at least one coding RNA comprises a 5′-UTR element and/or a 3′-UTR element.
[1371] 70. The isRNA for use according to any of items 20 to 69, wherein the at least one coding RNA comprises a poly(A) and/or a poly(C) sequence.
[1372] 71. The isRNA for use according to any of items 20 to 70, wherein the at least one coding RNA comprises a histone stem-loop sequence.
[1373] 72. The isRNA for use according to any of items 20 to 71, wherein the at least one coding RNA comprises
   [1374] a) a nucleic acid sequence selected from the group consisting of SEQ ID NOs: 146-151; 451-456; 157-162; 168-173; 179-184; 190-195; 201-206; 212-217; 223-228; 234-239; 245-250; 256-261 and 267-272, or a fragment or variant of any of these sequences, preferably from the group consisting of SEQ ID NOs: 153; 458; 164; 175; 186; 197; 208; 219; 230; 241; 252; 263, 274; 992 and 598, or a fragment or variant of any of these sequences,
   [1375] b) a nucleic acid sequence selected from the group consisting of SEQ ID NOs: 154; 459; 165; 176; 187; 198; 209; 220; 231; 242; 253; 264, 275 and 596, or a fragment or variant of any of these sequences,
   [1376] c) a nucleic acid sequence selected from the group consisting of SEQ ID NOs: 594; 595; 860-925, or a fragment or variant of any of these sequences, and/or
   [1377] d) optionally, a nucleic acid sequence selected from the group consisting of SEQ ID NOs: 144; 449; 155; 166; 177; 188; 199; 210; 221; 232; 243; 254 and 265, or a fragment or variant of any of these sequences, preferably from the group consisting of SEQ ID NOs: 145; 450; 156; 167; 178; 189; 200; 211; 222; 233; 244; 255; 266 and 597, or a fragment or variant of any of these sequences.
[1378] 73. The isRNA for use according to item any of items 20 to 72, wherein the treatment comprises administration, preferably intratumoral administration, of at least three coding RNAs, wherein
   [1379] a first coding RNA comprises a nucleic acid sequence selected from the group consisting of SEQ ID NOs: 153; 164; 175; 186; 197; 208; 219; 230; 241; 252; 263; 274; 992; 458; 598; 32; 43; 54; 65; 76; 87; 98; 109; 120; 131; 142; 608; 619; 630; 632-644; 726 and 1058, or a fragment or variant of any of these sequences,
   [1380] a second coding RNA comprises a nucleic acid sequence selected from the group consisting of SEQ ID NOs: 33; 44; 55; 66; 77; 88; 99; 110; 121; 132; 143; 609; 620; 631; 728-738; 1025-1028; 154; 165; 176; 187; 198; 209; 220; 231; 242; 253; 264; 275; 459 and 596, or a fragment or variant of any of these sequences,
   [1381] a third coding RNA comprises a nucleic acid sequence selected from the group consisting of SEQ ID NOs: 920-922; 923-925; 646-660; 662-676; 678-692; 694-705; 707-715 or 1029-1041, or a fragment or variant of any of these sequences, and
   [1382] optionally, a fourth coding RNA comprises a nucleic acid sequence selected from the group consisting of SEQ ID NOs: 145; 156; 167; 178; 189; 200; 211; 222; 233; 244; 255; 266; 450; 597; 24; 35; 46; 57; 68; 79; 90; 101; 112; 123; 134; 600; 611; 622 and 1043-1054, or a fragment or variant of any of these sequences.
[1383] 74. The isRNA for use according to claim any of items 20 to 73, wherein the treatment comprises administration, preferably intratumoral administration, of at least four coding RNAs, wherein
   [1384] a first coding RNA comprises a nucleic acid sequence selected from the group consisting of SEQ ID NOs: 153; 164; 175; 186; 197; 208; 219; 230; 241; 252; 263; 274; 992; 458 and 598, or a fragment or variant of any of these sequences,
   [1385] a second coding RNA comprises a nucleic acid sequence selected from the group consisting of SEQ ID NOs: 154; 165; 176; 187; 198; 209; 220; 231; 242; 253; 264; 275; 459 and 596, or a fragment or variant of any of these sequences,
   [1386] a third coding RNA comprises a nucleic acid sequence selected from the group consisting of SEQ ID NOs: 594 and 860-874, or a fragment or variant of any of these sequences,
   [1387] a fourth coding RNA comprises a nucleic acid sequence selected from the group consisting of SEQ ID NOs: 595 and 890-904, or a fragment or variant of any of these sequences, and
   [1388] optionally, a fifth coding RNA comprises a nucleic acid sequence selected from the group consisting of SEQ ID NOs: 145; 156; 167; 178; 189; 200; 211; 222; 233; 244; 255; 266; 450 and 597, or a fragment or variant of any of these sequences.
[1389] 75. The isRNA for use according to any of items 20 to 74, wherein the at least one coding RNA comprises
   [1390] a) a nucleic acid sequence selected from the group consisting of SEQ ID NOs: 278-283; 289-294; 300-305; 311-316; 322-327; 333-338; 344-349; 355-360; 366-371; 377-382; 388-393; 399-404 and 462-467, or a fragment or variant of any of these sequences, preferably from the group consisting of SEQ ID NOs: 285; 296; 307; 318; 329; 340; 351; 362; 373; 384; 395; 406; 430; 469 and 992, or a fragment or variant of any of these sequences,
   [1391] b) a nucleic acid sequence selected from the group consisting SEQ ID NO: 286; 297; 308; 319; 330; 341; 352; 363; 374; 385; 396; 470 and 407, or a fragment or variant of any of these sequences, and/or
   [1392] c) a nucleic acid sequence selected from the group consisting of SEQ ID NOs: 926-955; or a fragment or variant of any of these nucleic acid sequences, and a nucleic acid sequence selected from the group consisting of SEQ ID NOs: 956-985, or a fragment or variant of any of these nucleic acid sequences; or a nucleic acid sequence selected from the group consisting of SEQ ID NOs: 986-991, or a fragment or variant of any of these nucleic acid sequences, and/or
   [1393] d) optionally, a nucleic acid sequence selected from the group consisting of SEQ ID NOs: 276; 287; 298; 309; 320; 331; 342; 353; 364; 375; 386; 460 and 397, or a fragment or variant of any of these sequences, preferably from the group consisting of SEQ ID NOs: 277; 288; 299; 310; 321; 332; 343; 354; 365; 376; 461; 387 and 398 or a fragment or variant of any of these sequences.
[1394] 76. The isRNA for use according to any of items 20 to 65, wherein the treatment comprises administration, preferably intratumoral administration, of at least four coding RNAs, wherein
   [1395] a first coding RNA comprises a nucleic acid sequence selected from the group consisting of SEQ ID NOs: 285; 296; 307; 318; 329; 340; 351; 362; 373; 384; 395; 406; 430; 469 and 992, or a fragment or variant of any of these sequences,
   [1396] a second coding RNA comprises a nucleic acid sequence selected from the group consisting of SEQ ID NOs: 286; 297; 308; 319; 330; 341; 352; 363; 374; 385; 396; 470 and 407, or a fragment or variant of any of these sequences,
   [1397] a third coding RNA comprises a nucleic acid sequence selected from the group consisting of SEQ ID NOs: 926-940, or a fragment or variant of any of these sequences, and/or
   [1398] a fourth coding RNA comprises a nucleic acid sequence selected from the group consisting of SEQ ID NOs: 956-970, or a fragment or variant of any of these sequences and/or
   [1399] optionally, a fifth coding RNA comprises a nucleic acid sequence selected from the group consisting of SEQ ID NOs: 277; 288; 299; 310; 321; 332; 343; 354; 365; 376; 387; 461 and 398, or a fragment or variant of any of these sequences.
[1400] 77. The isRNA for use according to any of items 20 to 76, wherein the isRNA is administered as RNA complexed with one or more cationic or polycationic compounds, and the at least one coding RNA, more preferably an mRNA, is administered as free RNA or is administered as RNA that is complexed with one or more lipids, thereby forming liposomes, lipid nanoparticles and/or lipoplexes.
[1401] 78. The isRNA for use according to any of items 1 to 77, wherein the treatment comprises chemotherapy, radiation therapy and/or surgery.
[1402] 79. Pharmaceutical composition comprising an immunostimulatory RNA (isRNA) and a pharmaceutically acceptable carrier and/or vehicle for use in the treatment or prophylaxis of a tumor or cancer disease selected from the group consisting of cutaneous melanoma (cMEL), cutaneous squamous cell carcinoma (cSCC), head and neck squamous cell carcinoma (HNSCC), adenoid cystic carcinoma (ACC), cutaneous T-cell lymphoma, preferably cutaneous T-cell lymphoma of mycosis fungoides subtype, and vulvar squamous cell cancer (VSCC), wherein the tumor or the cancer disease is preferably at an advanced stage and/or refractory to standard therapy, wherein the pharmaceutical composition is administered intratumorally.
[1403] 80. The pharmaceutical composition for use according to item 79, wherein the isRNA is as defined in items 1 to 12.
[1404] 81. The pharmaceutical composition for use according to item 79 or 80, wherein the treatment comprises administration of at least one additional pharmaceutically active ingredient, preferably as defined in any of items 13 to 68.
[1405] 82. Kit or kit of parts comprising an immunostimulatory RNA (isRNA), preferably the isRNA as defined in items 1 to 12, or the pharmaceutical composition as defined in any of items 79 to 81, and optionally technical instructions with information on the administration and dosage for administration,
   [1406] for use in the treatment of a tumor or cancer disease selected from the group consisting of cutaneous melanoma (cMEL), cutaneous squamous cell carcinoma (cSCC), head and neck squamous cell carcinoma (HNSCC), adenoid cystic carcinoma (ACC), cutaneous T-cell lymphoma, preferably cutaneous T-cell lymphoma of mycosis fungoides subtype, and vulvar squamous cell cancer (VSCC), wherein the tumor or the cancer disease is preferably at an advanced stage and/or refractory to standard therapy,
   [1407] wherein the pharmaceutical composition is administered intratumorally.
[1408] 83. Use of an isRNA, preferably the isRNA as defined according to any of items 1 to 12, the pharmaceutical composition as defined in any of items 79 to 81, or the kit or kit of parts as defined in item 82, for use in the manufacture of a medicament for treatment of a tumor or cancer disease selected from the group consisting of cutaneous melanoma (cMEL), cutaneous squamous cell carcinoma (cSCC), head and neck squamous cell carcinoma (HNSCC), adenoid cystic carcinoma (ACC), cutaneous T-cell lymphoma, preferably cutaneous T-cell lymphoma of mycosis fungoides subtype, and vulvar squamous cell cancer (VSCC), wherein the tumor or the cancer disease is preferably at an advanced stage and/or refractory to standard therapy, for intratumoral, peritumoral or locoregional administration, preferably for intratumoral administration.
[1409] 84. Method of treating or preventing a disorder selected from the group consisting of cutaneous melanoma (cMEL), cutaneous squamous cell carcinoma (cSCC), head and neck squamous cell carcinoma (HNSCC), adenoid cystic carcinoma (ACC), cutaneous T-cell lymphoma, preferably cutaneous T-cell lymphoma of mycosis fungoides subtype, and vulvar squamous cell cancer (VSCC), wherein the disorder is preferably at an advanced stage and/or refractory to standard therapy, wherein the method comprises administering, preferably intratumorally, to a subject in need thereof an effective amount of an isRNA, preferably the isRNA as defined according to any of items 1 to 12, the pharmaceutical composition as defined in any of items 79 to 81, or the kit or kit of parts as defined in item 82.
[1410] 85. Combination of an isRNA and at least one coding RNA, wherein the at least one coding RNA encodes at least one peptide or protein comprising IL-12, CD40L, a decoy PD-1 receptor, an anti-CTLA4 antibody, and/or a tumor antigen, or a fragment or variant of each of these proteins.
[1411] 86. The combination according to item 85, wherein the isRNA is an isRNA as defined in any of items 4 to 12.
[1412] 87. The combination according to item 85 or 86, wherein the at least one coding RNA is a coding RNA as defined in any of items 13 to 78.
[1413] 88. The combination according to any of items 85 to 87, wherein the isRNA and the at least one coding RNA are formulated together or separately.
[1414] 89. The combination according to any of items 85 to 88, wherein the isRNA and the at least one coding RNA are administered concomitantly.
[1415] 90. The combination according to any of items 85 to 89, wherein the isRNA and the at least one coding RNA are administered at the same site.
[1416] 91. The combination according to any of items 85 to 90 for use in the treatment or prophylaxis of a disease selected from the group consisting of tumor and cancer disease, infectious diseases, allergies and autoimmune diseases.
[1417] 92. The combination according to item 91, wherein the combination is for use in the treatment or prophylaxis of a tumor or a cancer disease.
[1418] 93. The combination according to item 92, wherein the combination is for use in the treatment or prophylaxis of a tumor or cancer disease selected from the group consisting of cutaneous melanoma (cMEL), cutaneous squamous cell carcinoma (cSCC), head and neck squamous cell carcinoma (HNSCC), adenoid cystic carcinoma (ACC), cutaneous T-cell lymphoma, preferably cutaneous T-cell lymphoma of mycosis fungoides subtype, and vulvar squamous cell cancer (VSCC), wherein the tumor or the cancer disease is preferably at an advanced stage and/or refractory to standard therapy.
[1419] 94. The combination according to item 93, wherein the combination is administered intratumorally
[1420] 95. The combination according to item 93 or 94, wherein the treatment or prophylaxis comprises administration of at least one additional pharmaceutically active ingredient.
[1421] 96. The combination according to item 95, wherein the at least one additional pharmaceutically active ingredient is a compound as defined in items 14 to 18.
[1422] 97. The combination according to item 96, wherein the at least one additional pharmaceutically active ingredient is a PD-1 inhibitor or a PD-L1 inhibitor, preferably an antagonistic antibody directed against PD-1 or PD-L1, or a fragment or variant thereof.
[1423] 98. The combination according to item 96, wherein the at least one additional pharmaceutically active ingredient is an anti-CTLA4 antibody, or a fragment or variant thereof.
[1424] 99. Coding RNA encoding a protein comprising at least one peptide or protein comprising IL-12, CD40L, a decoy PD-1 receptor, an anti-CTLA4 antibody, and/or a tumor antigen, or a fragment or variant of any of these proteins.
[1425] 100. The coding RNA according to item 99, which is a coding RNA as defined in any of items 13 to 78.
[1426] 101. The coding RNA according to item 99 or 100 for use in the treatment or prophylaxis of a tumor or cancer disease selected from the group consisting of cutaneous melanoma (cMEL), cutaneous squamous cell carcinoma (cSCC), head and neck squamous cell carcinoma (HNSCC), adenoid cystic carcinoma (ACC), cutaneous T-cell lymphoma, preferably cutaneous T-cell lymphoma of mycosis fungoides subtype, and vulvar squamous cell cancer (VSCC), wherein the tumor or the cancer disease is preferably at an advanced stage and/or refractory to standard therapy.
[1427] 102. The coding RNA for use according to item 101, wherein the coding RNA comprises at least one coding sequence encoding a peptide or protein comprising IL-12 or a fragment or variant thereof.
[1428] 103. The coding RNA for use according to any of items 99 to 102, wherein the at least one coding RNA comprises at least one coding sequence encoding a peptide or protein comprising CD40L or a fragment or variant thereof and
   [1429] at least one coding sequence encoding a peptide or protein comprising IL-12 or a fragment or variant thereof.
[1430] 104. The coding RNA for use according to any of items 99 to 103, wherein the at least one coding RNA comprises at least one coding sequence encoding a peptide or protein comprising CD40L or a fragment or variant thereof, and
   [1431] at least one coding sequence encoding a peptide or protein comprising a decoy PD-1 receptor or a fragment or variant thereof.
[1432] 105. The coding RNA for use according to any of items 99 to 104, wherein the at least one coding RNA comprises at least one coding sequence encoding a peptide or protein comprising IL-12 or a fragment or variant thereof, and
   [1433] at least one coding sequence encoding a peptide or protein comprising a decoy PD-1 receptor or a fragment or variant thereof.
[1434] 106. The coding RNA for use according to any of items 99 to 105, wherein the at least one coding RNA comprises at least one coding sequence encoding a peptide or protein comprising IL-12 or a fragment or variant thereof, and
   [1435] at least one coding sequence encoding at least one tumor antigen or a fragment or variant thereof.
[1436] 107. The coding RNA for use according to any of items 99 to 106, wherein the at least one coding RNA comprises at least one coding sequence encoding a peptide or protein comprising CD40L or a fragment or variant thereof, and
   [1437] at least one coding sequence encoding a peptide or protein comprising an anti-CTLA4 antibody, or a fragment or variant thereof.
[1438] 108. The coding RNA for use according to any of items 99 to 107, wherein the at least one coding RNA comprises at least one coding sequence encoding a peptide or protein comprising IL-12 or a fragment or variant thereof, and
   [1439] at least one coding sequence encoding a peptide or protein comprising an anti-CTLA4 antibody, or a fragment or variant thereof.
[1440] 109. The coding RNA for use according to any of items 99 to 108, wherein the at least one coding RNA comprises at least one coding sequence encoding a peptide or protein comprising a decoy PD-1 receptor or a fragment or variant thereof, and
   [1441] at least one coding sequence encoding a peptide or protein comprising an anti-CTLA4 antibody, or a fragment or variant thereof.
[1442] 110. The coding RNA for use according to any of items 99 to 109, wherein the at least one coding RNA comprises at least one coding sequence encoding a peptide or protein comprising IL-12 or a fragment or variant thereof, at least one coding sequence encoding a peptide or protein comprising CD40L or a fragment or variant thereof, and
   [1443] at least one coding sequence encoding a peptide or protein comprising an anti-CTLA4 antibody, or a fragment or variant thereof.
[1444] 111. The coding RNA for use according to any of items 99 to 110, wherein the treatment or prophylaxis comprises administration of a second coding RNA, and/or a third coding RNA, wherein
   [1445] the coding RNA comprises at least one coding sequence encoding a peptide or protein comprising IL-12 or a fragment or variant thereof,
   [1446] the second coding RNA comprises at least one coding sequence encoding a peptide or protein comprising CD40L or a fragment or variant thereof,
   [1447] the third coding RNA comprises at least one coding sequence encoding a peptide or protein comprising an anti-CTLA4 antibody, or a fragment or variant thereof.
[1448] 112. The coding RNA for use according to item 111, whereint the treatment or prophylaxis further comprises administration of a fourth coding RNA, wherein the fourth coding RNA comprises at least one coding sequence encoding a peptide or protein comprising a decoy PD-1 receptor or a fragment or variant thereof
[1449] 113. The coding RNA for use according to item 111 or 112, wherein the second RNA, the third RNA, and/or the fourth RNA is a coding RNA as defined in any of items 13 to 78.
[1450] 114. The coding RNA for use according to any of items 101 to 113, wherein the treatment or prophylaxis comprises administration of an isRNA.
[1451] 115. The coding RNA for use according to item 114, wherein the isRNA is an isRNA as defined in any of items 4 to 12.
[1452] 116. The coding RNA for use according to any of items 101 to 115, wherein the at least one coding RNA is administered intratumorally,
[1453] 117. The coding RNA for use according to any of items 101 to 116, wherein the treatment or prophylaxis comprises administration of at least one additional pharmaceutically active ingredient, preferably a compound that is conventionally used in the treatment of a tumor or cancer disease selected from the group consisting of cutaneous melanoma (cMEL), cutaneous squamous cell carcinoma (cSCC), head and neck squamous cell carcinoma (HNSCC), adenoid cystic carcinoma (ACC), cutaneous T-cell lymphoma, preferably cutaneous T-cell lymphoma of mycosis fungoides subtype, and vulvar squamous cell cancer (VSCC), wherein the tumor or the cancer disease is preferably at an advanced stage and/or refractory to standard therapy.
[1454] 118. The coding RNA for use according to item 117, wherein the at least one additional pharmaceutically active ingredient is a compound as defined in any of items 14 to 33.
[1455] 119. The coding RNA for use according to item 117 or 118, wherein the at least one additional pharmaceutically active ingredient is a PD-1 inhibitor or a PD-L1 inhibitor, preferably an antagonistic antibody directed against PD-1 or PD-L1, or a fragment or variant thereof.
[1456] 120. The coding RNA for use according to any one of items 117 to 119, wherein the at least one additional pharmaceutically active ingredient is an anti-CTLA4 antibody, or a fragment or variant thereof.

### EXAMPLES

[1457] The Examples shown in the following are merely illustrative and shall describe the present invention in a further way. These Examples shall not be construed to limit the present invention thereto.

[1458] Preparation of DNA, mRNA Constructs and Immunostimulatory RNA (RNAdjuvant)

[1459] 1. Preparation of DNA and RNA Constructs

TABLE 3
RNA constructs

| RNA | Description | SEQ ID NO: |
|---|---|---|
| R2025 R2391 | Non-coding immunostimulatory RNA | 433 |
| | (RNAdjuvant) | |
| R2763 | mRNA encoding murine IL-12 (IL-12 (GC)) | 430 |
| R3971 | mRNA encoding murine soluble PD-1 | 431 |
| | (soluble PD-1 (GC)) | |
| R3571 | mRNA encoding murine CD40L | 432 |
| | (CD40L (GC)) | |
| R5417 | mRNA encoding heavy chain (HC) of anti-CTLA4 antibody | 594 |
| | (HC anti-CTLA4Ab (GC)) | |
| R5418 | mRNA encoding light chain (LC) of anti-CTLA4 antibody | 595 |
| | (HLC anti-CTLA4 Ab (GC)) | |

[1460] The constructs of IL-12 (GC), soluble PD-1 (GC) (solPD1), CD40L (GC) and two anti-CTLA4 antibody chains were prepared by a stabilizing sequence derived from the albumin-3′-UTR, a stretch of 64 adenosines (poly(A)-sequence), a stretch of 30 cytosines (poly(C)-sequence), and a histone stem loop. Most DNA sequences were prepared by modifying the wild type encoding DNA sequences by introducing a GC-optimized sequence for stabilization, using an in silico algorithm that increase the GC content of the respective coding sequence compared to the wild type coding sequence. The mRNAs expressing human IL-12, soluble PD-1 receptor, CD40L and anti-CTLA4 antibody are prepared in analogous manner by using the corresponding human coding sequences.

[1461] For the present example, a DNA sequence encoding the non-coding immunostimulatory RNA (isRNA) R2025 was prepared and used for subsequent RNA in vitro transcription reactions.

[1462] 2. RNA In Vitro Transcription

[1463] The respective DNA plasmids prepared according to section 1 above were transcribed in vitro using T7 polymerase. The RNA in vitro transcription reactions of the IL-12, CD40L, soluble PD-1 and anti-CTLA4 antibody encoding constructs were performed in the presence of a CAP analog (m7GpppG). The isRNA R2025 was prepared without CAP analog. Subsequently, the RNA was purified using PureMessenger® (CureVac, Tübingen, Germany; WO2008077592).

[1464] 3. Preparation of the Polymeric Cargo Complex (“RNAdjuvant”)

[1465] The following cationic peptide as cationic component of the polymeric carrier was used (Cys-Arg12-Cys or CR12C) according to SEQ ID NO: 579 or SEQ ID NO: 580.

[1466] For synthesis of the polymeric carrier cargo complexes, an RNA molecule having the RNA sequence R2025 as defined in section 1 above was mixed with the cationic CR12C (SEQ ID NO: 579) peptide component as defined above. The specified amount of the RNA was mixed with the respective cationic component in mass ratios as indicated below, thereby forming a complex. If polymerizing cationic components were used according to the present invention, polymerization of the cationic components took place simultaneously to complexation of the nucleic acid cargo. Afterwards, the resulting solution was adjusted with water to a final volume of 50 μl and incubated for 30 minutes at room temperature. Further details are described in WO2012013326.

[1467] The mass ratio of peptide:RNA was 1:3,7. The polymeric carrier cargo complex is formed by the disulfide-crosslinked cationic peptide CR12C (SEQ ID NO: 579) as carrier and the immunostimulatory R₂₀₂₅ as nucleic acid cargo. This polymeric carrier cargo complex R2025/CR12C (SEQ ID NO: 579) (R₂₃₉₁) was used as adjuvant in the following examples (referred to as “RNAdjuvant”)

[1468] 4. Preparation of the RNA for Administration

[1469] IL-12 mRNA (R1328), soluble PD-1 mRNA (R3971) and CD40L mRNA (R3571) were administered in Ringer's Lactate (RiLa) solution. The co-formulation of naked mRNAs and the polymeric carrier cargo complex “RNAdjuvant” (R2391) were also administered in Ringer's Lactate (RiLa) after mixing of both components directly before injection.

### Example 1: Intratumoral Treatment with an Immunostimulating RNA (“RNAdjuvant”) and an mRNA Encoding Soluble PD-1 and an mRNA Encoding IL-12

[1470] Balb/c mice (see Table 4) were injected subcutaneously (s.c.) with 1×10⁶ CT26 cells (colon carcinoma cell line) per mouse (in a volume of 100 μl PBS) on the right flank on day 0 of the experiment. At day 9 after tumor challenge, mice were sorted according to the tumor size to obtain groups with a mean tumor volume of approximately 50 mm³. Intratumoral (i.t.) therapy started at day 9 and continued twice a week for three weeks. Mice were injected with a combination of RNAdjuvant (25 μg of R2391), mRNA-encoded IL-12 (25 μg of R2763) and mRNA-encoded soluble PD-1 (R3971) (group A according to Table 2) or mRNA-encoded IL-12 (25 μg of R2763) (group B according to Table 2) alone or RNAdjuvant (25 μg of R2391) alone (group C according to Table 2). To control for anti-tumor effects due to injection procedure, mice were injected with buffer (RiLa, group D according to Table 4), respectively.

[1471] Tumor growth was monitored by measuring the tumor size in three dimensions using a calliper. Tumor volume was calculated according to the following formula:

$$volume ( {mm}^{3} ) = \frac{length ( mm ) \times π \times {width}^{2} ( {mm}^{2} )}{6}$$

[1472] On days 9, 11, 14, 17 and 21 of the experiment mice were injected intratumorally (i.t.) with RNA according to the Table 4 below. The volume for intratumoral injection was 50 μl.

[1473] Table 4 summarizes the treatment as used in the present example. RNAdjuvant and the mRNA constructs encoding IL-12 and soluble PD-1 were administered intratumorally (i.t.). In CT26 tumor challenged mice, survival rates and median tumor growth were analyzed.

TABLE 4
Groups, treatment and RNA dilution

| | No. of | | Amount | Vaccination |
|---|---|---|---|---|
| Group | mice | Constructs | of RNA (μg) | schedule |
| A | 10 | RNAdjuvant + IL-12 + | 25 each | 2× week |
| | | soluble PD-1 | | |
| B | 10 | IL-12 | 25 | 2× week |
| C | 10 | RNAdjuvant | 25 | 2× week |
| D | 10 | RiLa | — | 2× week |

[1474] Tumor Challenge and Administration of the Inventive Composition:

[1475] Mice were injected according to the indicated scheme shown in Table 4. Median tumor growth was determined according to formula above. The results of the experiment are shown in FIG. 1, wherein FIG. 1A shows the effect of the inventive composition on tumor growth and FIG. 1B shows the effect of the inventive composition on survival.

[1476] Results:

[1477] The results in FIG. 1A show that the inventive composition comprising an mRNA encoding IL-12 and mRNA encoding soluble PD-1 in combination with RNAdjuvant (group A according to Table 4) strongly decreased the median tumor volume compared to the other treatments (groups B-D according to Table 4). In addition, the results in FIG. 1B show that the inventive composition comprising an mRNA encoding IL-12 and mRNA encoding soluble PD-1 in combination with RNAdjuvant (group “A” according to Table 4) strongly increased the survival of tumor challenged mice compared to the other treatments (groups B-D according to Table 4).

### Example 2: Treatment with an Immunostimulating RNA (“RNAdjuvant”) in Combination with a Checkpoint Inhibitor Anti PD-1 Antibody

[1478] Table 5 summarizes the treatment as used in the present example. In addition to RNAdjuvant (administered i.t.), a checkpoint inhibitor anti PD-1 (BioXCell) was administered intraperitoneal (i.p.) in CT26 tumor challenged mice, survival rates were analyzed.

TABLE 5
Groups, treatment and RNA
dilution/antibody dilution

| | No. of | Construct | Amount of | Antibody (i.p. | Vaccination |
|---|---|---|---|---|---|
| Group | mice | (i.t. treatment) | RNA (μg) | treatment) | schedule |
| A | 8 | RiLa | — | — | 2× week |
| B | 8 | RNAdjuvant | 25 | Control Ab | 2× week |
| | | | | (100 μg) | |
| C | 7 | RNAdjuvant | 25 | Anti-PD-1 | 2× week |
| | | | | (200 μq) | |
| D | 6 | RiLa | — | Anti-PD-1 | 2× week |
| | | | | (200 μg) | |

[1479] Tumor Challenge and Administration of the Inventive Composition:

[1480] The tumor challenge was performed according to the previous experiment (see Example 1). Mice were injected according to the indicated scheme shown in Table 5. The results of the experiment are shown in FIG. 2.

[1481] Results:

[1482] FIG. 2 shows that the intratumoral (i.t.) treatment with RNAdjuvant® (R2391) in combination with an i.p. administration of anti PD-1 antibody (Group “C” according to Table 5) resulted in an increase in survival compared to the relevant control group that only received the checkpoint inhibitor anti PD-1 antibody (Group “D” according to Table 5) and in an increase in survival rates compared to the treatment with RNAdjuvant and a control antibody (anti hamster IgG, BioXCell) (Group “B” according to Table 5).

### Example 3: Intratumoral Treatment with an Immunostimulating RNA (“RNAdjuvant”) and an mRNA Encoding CD40 Ligand (CD40L) and an mRNA Encoding IL-12

[1483] Table 6 summarizes the treatment as used in the present example. RNAdjuvant and the mRNA constructs encoding IL-12 and murine CD40L were administered intratumorally (i.t.). In CT26 tumor challenged mice, survival rates were analysed.

TABLE 6
Groups, treatment and RNA dilution

| | No. of | | Vaccination |
|---|---|---|---|
| Group | mice | Constructs (amount of RNA) | schedule |
| A | 10 | RNAdjuvant (50 μg) + IL-12 (75 μg) + | 2× week |
| | | CD40L (75 μg) | |
| B | 10 | RNAdjuvant (100 μg) | 2× week |
| C | 10 | RiLa | 2× week |

[1484] Tumor Challenge and Administration of the Inventive Composition:

[1485] The tumor challenge was performed according to the previous experiments (see Example 1). Mice were injected according to the indicated scheme shown in Table 6. The results of the experiment are shown in FIG. 3.

[1486] Results:

[1487] The results in FIG. 3 show that the inventive composition comprising an mRNA encoding IL-12 and an mRNA encoding CD40L in combination with RNAdjuvant (group A according to Table 6) strongly increased the median survival of tumor challenged mice compared to the other treatments (groups B to C according to Table 6).

### Example 4: Induction of Systemic Anti-Tumoral Memory Response by Combinination of Intratumoral Treatment with an Immunostimulating RNA (“RNAdjuvant”) and Systemic Anti-PD-1 Treatment

[1488] Table 7 summarizes the treatment as used in the present example. RNAdjuvant (administered i.t.) and systemic treatment with a checkpoint inhibitor anti PD-1 (BioXCell) was evaluated by performing re-challenge of mice completely eradicating the primary CT-26 tumor after first treatment, survival rates were analyzed.

TABLE 7
Groups, treatment and RNA dilution

| | No. of | Constructs of first tumor challenge |
|---|---|---|
| Group | mice | (amount of RNA/Ab + route of treatment) |
| A | 7 | RNAdjuvant (100 μg, i.t.) + Anti-PD-1 (200 μg, i.p.) |
| B | 3 | RNAdjuvant (100 μg, i.t.) |
| C | 7 | RiLa |

[1489] Tumor Re-Challenge after Administration of the Inventive Composition:

[1490] First tumor challenge was performed by s.c. injection of CT-26 tumor cells on the right flank in Balb/C mice, whereas re-challenge with 1×10⁶ syngeneic CT26 colon carcinoma cells was performed on the left flank at day 113 after first tumor challenge. Challenge of naïve animals served as control. Tumor eradication of the primary tumor was noted in a lower percentage of animals with intratumoral RNAdjuvant alone (3 out of 10 mice) as compared to the combination of systemic anti-PD-1 with intratumoral RNAdjuvant (7 out of 9 mice). The results of the experiment are shown in FIG. 4.

[1491] Results:

[1492] The results in FIG. 4 show that all mice which have eradicated the first tumor were completely protected against the second tumor challenge demonstrating the induction of systemic memory response. Systemic memory response was also induced by intratumoral RNAdjuvant treatment alone. The induction of a systemic memory response is remarkable as no vaccine inducing an adaptive immune response was administered. Therefore administration of the inventive isRNA, particularly in combination with systemic anti-PD-1 treatment, was sufficient to induce a systemic immune response which could not have been expected.

### Example 5: Induction of Systemic Anti-Tumoral Memory Response by Combination of Intratumoral Treatment with an mRNA Encoding CD40 Ligand (CD40L) and an mRNA Encoding IL-12

[1493] Table 8 summarizes the treatment as used in the present example. RNAdjuvant and the mRNA constructs encoding IL-12 and murine CD40L (administered i.t.) were evaluated by performing re-challenge of mice completely eradicating the primary CT-26 tumor after treatment, survival rates were analyzed.

TABLE 8
Groups, treatment and RNA dilution

| | No. of | Constructs of first tumor challenge |
|---|---|---|
| Group | mice | (amount of RNA) |
| A | 5 | RNAdjuvant (50 μg) + CD40L (75 μg) + IL-12 (75 μg) |
| B | 3 | RNAdjuvant (100 μg) |
| C | 7 | RiLa |

[1494] Tumor Re-Challenge after Administration of the Inventive Composition:

[1495] First tumor challenge was performed by s.c. injection of CT-26 tumor cells on the right flank in Balb/C mice. After intratumorally treatment with RNAdjuvant alone or in combination with an mRNA encoding CD40 ligand (CD40L) and an mRNA encoding IL-12 treatment, re-challenge with 1×10⁶ syngeneic CT26 colon carcinoma cells was performed on the left flank at day 113 after the first tumor challenge. Challenge of naïve animals served as control. Tumor eradication of the primary tumor was noted in a lower percentage of animals with intratumoral RNAdjuvant alone (3 out of 10 mice) as compared to the combination of mRNA encoding CD40 ligand (CD40L) and an mRNA-encoded IL-12 with intratumoral RNAdjuvant (5 out of 10 mice). The results of the experiment are shown in FIG. 5.

[1496] Results:

[1497] The results in FIG. 5 show that all mice which have eradicated the first tumor were completely protected against the second tumor challenge demonstrating the induction of systemic memory response. Systemic memory response was also induced by intratumoral RNAdjuvant treatment alone.

### Example 6: Phase I/II Study of Intratumoral Application of RNAdjuvant (CV8102) in Patients with Advanced Cutaneous Melanoma (cMEL), Cutaneous Squamous Cell Carcinoma (cSCC), Head and Neck Squamous Cell Carcinoma (hnSCC), or Adenoid Cystic Carcinoma (ACC)

[1498] Part 1:

[1499] Phase I, open label, cohort based dose escalation & expansion study of intratumorally administered RNAdjuvant, with or without systemic anti-PD-1 treatment, in patients having advanced cutaneous melanoma (cMEL), cutaneous squamous cell carcinoma (cSCC), head and neck squamous cell carcinoma (hnSCC), or adenoid cystic carcinoma (ACC).

[1500] Intratumoral injection of RNAdjuvant: CV8102 is administered to cutaneous, subcutaneous, or readily accessible lymph node lesions that can be injected using direct visualization or imaging-guidance (ultrasound) as clinically determined.

[1501] Schedule: Patients receive a maximum of 8 intratumoral administrations of CV8102, unless disease progression requiring initiation of next-line therapy or unacceptable toxicity occurs:

[1502] The first 5 administrations are performed in weekly intervals (Days 1, 8, 15, 22, 29). For patients on anti-PD-1 treatment in Cohorts C and D, CV8102 treatment is initiated on a day of anti-PD-1 treatment and will follow the anti-PD-1 treatment schedule after day 29.

[1503] The subsequent 3 administrations of CV8102 are performed with 2-week intervals (Cohorts A and B). For patients on anti-PD-1 treatment in study Cohorts C and D, the administrations of CV8102 after Day 29 follow the anti-PD-1 treatment schedule and are performed on the day of anti-PD-1 administration; i.e., patients on nivolumab receive CV8102 every 2nd week; patients on pembrolizumab receive CV8102 every 3rd week.

[1504] Part A: Dose Escalation of Single Agent RNAdjuvant

[1505] Part A of the study uses a 2 parameter Bayesian logistic regression model with overdose control for dose escalation. Cohorts of at least 1 (starting dose level) or 2 patients (any other dose level) with advanced cMEL, cSCC, hnSCC, or ACC are treated at escalating doses of intratumorally administered RNAdjuvant until identification of the maximum tolerated dose (MTD) and determination of the recommended dose (RD). A minimum of 7 patients should be enrolled in Part A.

[1506] The starting dose in Part A is 25 μg of RNAdjuvant. The further dose levels are listed in Table 9 below.

TABLE 9
Dose levels of RNAdjuvant
Dose Levels evaluated in Part A and C

| Dose Level | RNAdjuvant | No of Patients⁹ |
|---|---|---|
| Level -1 | 25μg | ≥1 |
| Level 2* | 50 μg | ≥2 |
| Level 3 | 100 μg | ≥2 |
| Level 4 | 150 μq | ≥2 |

*Starting dose level Part A; potential starting dose level Part C, based on review of Part A data
^{§}A minimum of 3 patients will be treated per cohort

[1507] Inclusion Criteria:

[1508] Cohort A:

[1509] Patients with histologically confirmed advanced (unresectable or metastatic) cMEL or cSCC who failed approved standard therapy or for whom no standard therapy is indicated

[1510] Not amenable to surgical resection or locoregional radiation therapy with curative intent

[1511] Progression on/after at least one line of therapy

[1512] or

[1513] Histologically confirmed recurrent or metastatic hnSCC

[1514] Not amenable to surgical resection or locoregional radiation therapy with curative intent

[1515] Progression documented radiologically (documentation of a new or progressive lesion on/after at least one line of therapy.

[1516] or

[1517] Histologically or cytologically confirmed ACC

[1518] Not amenable to surgical resection or locoregional radiation therapy with curative intent

[1519] Progression documented radiologically; on/after at least one line of therapy

[1520] Part B: Expansion Cohort

[1521] After completion of Part A, patients with advanced cSCC or ACCare enrolled to separate expansion cohorts at the previously defined recommended dose to further characterize the tolerability and safety profile of intratumorally administered RNAdjuvant in these patient populations and to collect pre-liminary evidence of anti-tumor activity. Part B should enrol up to 10 patients per expansion cohort. Inclusion criteria:

[1522] Cohort B:

[1523] Expansion cohorts B1 and B2

[1524] Patients with histologically confirmed advanced (unresectable/metastatic) cSCC (B1) or ACC (B2) who failed standard therapy or for whom no standard therapy is indicated

[1525] Not amenable to curative locoregional treatments

[1526] Progression on/after at least one line of therapy (radiological documentation required for ACC)

[1527] Part C: Dose Escalation of RNAdjuvant in Combination with Anti-PD-1 Therapy in Patients with Advanced cMEL or HNSCC

[1528] Part C enrols patients with advanced cMEL or HNSCC currently receiving anti-PD-1 therapy. Patients must have stable disease or slowly progressive disease after at least 12 weeks of anti-PD-1 therapy prior to application of RNAjuvant. Cohorts of at least 2 patients are treated sequentially at escalating doses of RNAdjuvant. The dose escalation and the determination of the MTD and RCD (“recommended combination dose”) are guided by a 5 parameter bayesian logistic regression model with overdose control.

[1529] Dose escalation in Part C starts as soon as at least 3 doses of RNAdjuvant have been evaluated in Part A. Starting dose in Part C is one dose level below the highest dose level considered tolerable from part A at the time Part C is commenced (see Table 9).

[1530] Inclusion Criteria:

[1531] Cohorts C and D:

[1532] Histologically confirmed advanced (unresectable or metastatic) cMEL in Cohorts C and D1

[1533] Currently receiving standard anti-PD-1 therapy according to the Summary of Product Characteristics (SPC) Stable or slowly progressing disease after at least 12 weeks of anti-PD-1 therapy according to investigator assessment

[1534] Intention to continue current anti-PD-1 therapy due to an assumed clinical benefit by continued anti-PD-1 therapy according to investigators judgement

[1535] Histologically confirmed recurrent or metastatic hnSCC in Cohorts C and D2

[1536] Currently receiving standard anti-PD-1 therapy according to the SPC

[1537] Stable or slowly progressing disease after at least 12 weeks of anti-PD-1 therapy, defined as follows:

[1538] Stable disease according to irRECIST

[1539] Intention to continue current anti-PD-1 therapy due to an assumed clinical benefit according to investigators judgement

[1540] Part D: Expansion Cohort of RNAdjuvant in Combination with Anti-PD-1 Therapy in Patients with Advanced cMEL or HNSCC.

[1541] Once the RCD (“recommended combination dose”) has been established in Part C, the expansion Part D enrols additional patients with advanced cMEL or HNSCC on treatment with a PD-1 antagonist (refer to eligibility requirements Part C) to further characterize the tolerability and the safety profile and to evaluate the anti-tumor activity of the combination therapy. Part D should enrol about 21 patients.

[1542] Part 2 (May Alternatively be Performed as Separate Clinical Trial)

[1543] Phase I, open label, cohort based dose escalation & expansion study of intratumorally and ministered RNAdjuvant and RNArt with or without systemic anti-PD-1 treatment in patients advanced malignant melanoma, squamous cell carcinoma of the skin (SCCs), adenocystic carcinoma (ACC), cutaneous T-cell lymphoma, or squamous cell carcinoma of the head and neck (HNSCC).

[1544] In Part 2 of the phase I clinical trial, Part 1 is repeated, but a fixed dose combination of RNArt and RNAdjuvant is investigated. Dose escalation methodology and cohort definitions including clinical indications are similar to Part 1. Please refer to the previous section for details.

[1545] However, for Part 2, information gained from Part 1 is considered that may lead to a change of the study design of Part 1 and/or 2. RNArt comprises 3 compounds based on optimized RNA that encodes IL-12, PD-1 decoy receptor and CD-40L.

### Example 7: Intratumoral Treatment with an Immunostimulating RNA (“RNAdjuvant”) and an mRNA Encoding CD40 Ligand (CD40L) and mRNA Encoding Soluble PD1 (solPD1) in Combination with a Checkpoint Inhibitor Anti CTLA-4 Antibody

[1546] Table 10 summarizes the treatment as used in the present example. RNAdjuvant and an mRNA encoding soluble PD1 and CD40L in combination with a checkpoint inhibitor anti-CTLA4 antibody (BioXcell, clone 9H10) were administered intratumorally (i.t.) in CT26 tumor challenged mice, median tumor growth were analyzed.

TABLE 10
Groups, treatment and RNA dilution/antibody dilution

| | RNAdjuvant (i.t.) | RNArt (i.t.) | anti-CTLA4 (i.t) | No. of |
|---|---|---|---|---|
| Group | (25 μg) | (25 μg) | (50 μg) | mice |
| A | RNAdjuvant | solPD1 + CD40L | anti-CTLA4 | 10 |
| B | RNAdjuvant | IL12 + solPD1+ CD40L | | 10 |
| C | Buffer | | | 9 |

[1547] Tumor Challenge and Administration of the Inventive Composition:

[1548] The tumor challenge was performed according to the previous experiments (see Example 1). Mice were injected according to the indicated scheme shown in Table 10. The results of the experiment are shown in FIG. 6.

[1549] Results:

[1550] The results in FIG. 6 show that the inventive composition comprising RNAdjuvant and an mRNA encoding soluble PD1 and CD40L in combination with a checkpoint inhibitor anti-CTLA4 antibody (group A according to Table 10) strongly decreased the median tumor volume.

### Example 8: Abscopal Effect of Intratumoral Treatment with an Immunostimulating RNA (RNAdjuvant) and an mRNA Encoding CD40 Ligand (CD40L) and mRNA Encoding Soluble PD1 (solPD1) in Combination with a Checkpoint Inhibitor Anti CTLA-4 Antibody

[1551] Tumor challenge and administration of the inventive composition: Balb/c mice were injected subcutaneously (s.c.) with 1×10⁶ CT26 cells (colon carcinoma cell line) per mouse (in a volume of 100 μl PBS) on the right flank on day 0 of the experiment. On day 5 of the experiment mice were injected subcutaneously (s.c.) with 1×10⁶ CT26 cells (in a volume of 100 μl PBS) on the left flank to observe an abscopal effect (effect on the untreated tumor) of the inventive composition. Table 10 of Example 7 summarizes the treatment as used in the present example. RNAdjuvant and an mRNA encoding soluble PD1 and CD40L in combination with an anti-CTLA4 checkpoint inhibitor were administered intratumorally (i.t.) in CT26 tumor bearing mice (right flank), median tumor growth of the untreated tumor (left flank) were analyzed.

[1552] Mice were injected according to the indicated scheme shown in Table 10 of Example 7. Median tumor growth of the untreated tumor (left flank) was analyzed. Results of the experiment are shown in FIG. 7.

[1553] Results:

[1554] Intratumoral treatment of one lesion with anti-CTLA4 antibody in combination with RNAdjuvant, mRNA encoding soluble PD1 and mRNA encoding CD40 ligand induces a systemic effect and inhibits tumor growth of the untreated tumor.

### Example 9: Intratumoral Treatment with an Immunostimulating RNA (RNAdjuvant) and mRNA Encoding CD40 Ligand (CD40L), mRNA Encoding IL12, mRNA Encoding Soluble PD1 (solPD1) and Anti-CTLA4 Antibody in Combination with Anti-PD1 Antibody (Administered i.p.)

[1555] Tumor Challenge and Administration of the Inventive Composition:

[1556] The tumor challenge is performed according to the previous experiments (see Example 1). Mice are injected according to the indicated scheme shown in Table 11.

[1557] Table 11 summarizes the treatment as use in the present example. RNAdjuvant and an mRNA encoding CD40L, mRNA encoding soluble PD1, mRNA encoding IL12, mRNA encoding CD40L and mRNA encoding the checkpoint inhibitor anti-CTLA4 antibody are administered intratumorally (i.t.) in combination with checkpoint inhibitor anti PD1 antibody in CT26 tumor challenged mice, median tumor growth and survival rates are analyzed.

TABLE 11
Groups, treatment and RNA dilution/antibody dilution

| | | | | anti-PD1 | No. of |
|---|---|---|---|---|---|
| Group | RNAdjuvant (i.t.) | RNArt (i.t.) | anti-CTLA4 (i.t.) | (i.p.) | mice |
| 1 | RNAdjuvant | IL12 + CD40L | anti-CTLA4 | anti-PD1 | 10 |
| 3 | RNAdjuvant | IL12 + CD40L + solPD1 | anti-CTLA4 | | 10 |
| 2 | RNAdjuvant | IL12 + CD40L | anti-CTLA4 | | 10 |
| 4 | RNAdjuvant | IL12 + CD40L | | anti-PD1 | 10 |
| 5 | RNAdjuvant | IL12 + CD40L + solPD1 | | | 10 |
| 6 | RNAdjuvant | IL12 + CD40L | | | 10 |
| 7 | | | anti-CTLA4 | anti-PD1 | 10 |
| 8 | | | anti-CTLA4 | | 10 |
| 9 | | | | anti-PD1 | 10 |
| 10 | Puffer | | | | 8 |

### Example 10: Intratumoral Treatment with an Immunostimulating RNA (RNAdjuvant) and an mRNA Encoding for an Antigen (RNActive) Administered Intradermally (i.d.) in Combination with Anti-PD1 Antibody (Administered i.p.)

[1558] C57BL/6 mice were inoculated s.c. with 3×10⁵ E.G7-OVA tumor cells in the right flank. Treatment was start at a mean tumor size of 30 mm³. Mice were treated i.t. with immunostimulatory RNAdjuvant and vaccinated i.d. with OVA RNActive (mRNA encoding ovalbumine) in combination with an anti PD1 antibody (administered i.p.). mRNA encoding Photinus pyralis Luciferase (PpLuc) or buffer were used as unspecific control. On days 7, 11, 14, 17, and 20 of the experiment mice were treated according to Table 12 below. Median tumor growth and survival rates were analyzed.

TABLE 12
Groups, treatment and RNA dilution/antibody dilution

| | No. of | Anti-PD1 (i.p.) | RNAdjuvant (i.t.) | RNActive (i.d.) |
|---|---|---|---|---|
| Group | mice | (200 μg) | (25 μg) | (32 μg) |
| A | 10 | Anti-PD1 | RNAdjuvant | OVA |
| B | 10 | Anti-PD1 | RNAdjuvant | |
| C | 10 | | | OVA |
| D | 10 | | PpLuc | PpLuc |
| E | 10 | | Buffer | Buffer |

[1559] Tumor Challenge and Administration of the Inventive Composition:

[1560] Mice were injected according to the indicated scheme shown in Table 12. The results of the experiment are shown in FIG. 8.

[1561] Results:

[1562] The results in FIG. 8 show that the immunostimulatory RNA (RNAdjuvant) administered i.t. in combination with mRNA encoding the tumor antigen ovalbumine (OVA) and in combination with an anti PD1 antibody strongly decreased the tumor growth compared to the other treatments (groups B-E according to Table 12). Remarkably, the results in FIG. 8 show that the immunostimulatory RNAdjuvant in combination with a checkpoint inhibitor PD1 antibody and mRNA vaccination (OVA, administered i.d.) induced complete tumor remission and significantly increased the survival of tumor challenged mice compared to the other treatments (groups B-E according to Table 13).

### Example 11: Intratumoral Treatment with an Immunostimulating RNA (RNAdjuvant) and an mRNA Encoding IL12 Administered i.t. In Combination with an mRNA Encoding an Antigen (RNActive) Administered i.d

[1563] C57BL/6 mice were inoculated s.c. with 3×105 E.G7-OVA tumor cells in the right flank. Treatment was started at a mean tumor size of 30 mm³. Mice were treated i.t. with immunostimulatory RNAdjuvant and vaccinated i.d. with mRNA encoding the tumor antigen ovalbumine (OVA RNActive) in combination with an mRNA encoding IL12 (administered i.t.). mRNA encoding Photinus pyralis luciferase (PpLuc RNActive) or buffer were used as unspecific control. On days 7, 11, 14, 17, and 20 of the experiment mice were treated according to Table 13 below. Median tumor growth and survival rates were analyzed.

TABLE 13
Groups, treatment and RNA dilution

| | No. | RNAdjuvant (i.t.) | RNArt (i.t.) | RNActive (i.d.) |
|---|---|---|---|---|
| Group | of mice | 25 μg | 25 μg | 32 μg |
| A | 10 | RNAdjuvant | IL12 | OVA |
| B | 10 | RNAdjuvant | IL12 | |
| C | 10 | | | OVA |
| D | 10 | | PpLuc | PpLuc |
| E | 10 | | Buffer | Buffer |

[1564] Tumor Challenge and Administration of the Inventive Composition:

[1565] Mice were injected according to the indicated scheme shown in Table 13. The results of the experiment are shown in FIG. 9.

[1566] Results:

[1567] The results in FIG. 9 show that intratumoral treatment with immunostimulatory RNA (RNAdjuvant) and an mRNA encoding IL12 in combination with intradermal vaccination with OVA RNActive strongly decreased the median tumor volume compared to the other treatments (groups B-E according to Table 13). In addition, the results in FIG. 9 show that the inventive composition comprising an immunostimulatory RNA (RNAdjuvant) and an mRNA encoding IL12 combined with mRNA vaccination (OVA RNActive) strongly increased the survival of tumor challenged mice compared to the other treatments (groups B-E according to Table 13).

### Example 12: Phase I/II Study of Intratumoral Application of RNAdjuvant (CV8102) in Patients with Advanced Cutaneous Melanoma (cMEL), Cutaneous Squamous Cell Carcinoma (cSCC), Head and Neck Squamous Cell Carcinoma (hnSCC), Adenoid Cystic Carcinoma (ACC), Vulvar Squamous Cell Carcinoma (VSCC), or Cutaneous T-Cell Lymphoma, Mycosis Fungoides Subtype (CTCL-MF)

[1568] Part 1:

[1569] Phase I, open label, cohort based dose escalation & expansion study of intratumorally administered RNAdjuvant, with or without systemic anti-PD-1 treatment, in patients having advanced cutaneous melanoma (cMEL), cutaneous squamous cell carcinoma (cSCC), head and neck squamous cell carcinoma (hnSCC), adenoid cystic carcinoma (ACC), vulvar squamous cell carcinoma (VSCC), or cutaneous T-cell lymphoma, mycosis fungoides subtype (CTCL-MF).

[1570] Intratumoral injection of RNAdjuvant: CV8102 is administered to cutaneous, subcutaneous, or readily accessible lymph node lesions that can be injected using direct visualization or imaging-guidance (ultrasound) as clinically determined.

[1571] Schedule: Patients receive a maximum of 8 intratumoral administrations of CV8102, unless disease progression requiring initiation of next-line therapy or unacceptable toxicity occurs:

[1572] The first 5 administrations are performed in weekly intervals (Days 1, 8, 15, 22, 29). For patients on anti-PD-1 treatment in Cohorts C and D, CV8102 treatment is initiated on a day of anti-PD-1 treatment and will follow the anti-PD-1 treatment schedule after day 29.

[1573] The subsequent 3 administrations of CV8102 are performed with 2-week intervals (Cohorts A and B). For patients on anti-PD-1 treatment in study Cohorts C and D, the administrations of CV8102 after Day 29 follow the anti-PD-1 treatment schedule and are performed on the day of anti-PD-1 administration; i.e., patients on nivolumab receive CV8102 every 2nd week; patients on pembrolizumab receive CV8102 every 3rd week.

[1574] Part A: Dose Escalation of Single Agent RNAdjuvant

[1575] Part A of the study uses a 2 parameter Bayesian logistic regression model with overdose control for dose escalation. Cohorts of at least 1 (starting dose level) or 2 patients (any other dose level) with advanced cMEL, cSCC, hnSCC, or ACC are treated at escalating doses of intratumorally administered RNAdjuvant until identification of the maximum tolerated dose (MTD) and determination of the recommended dose (RD). A minimum of 7 patients should be enrolled in Part A.

[1576] The starting dose in Part A is 25 μg of RNAdjuvant. The further dose levels are listed in Table 14 below.

TABLE 14
Dose levels of RNAdjuvant
Dose Levels evaluated in Part A and C

| Dose Level | RNAdjuvant | No of Patients^{§} |
|---|---|---|
| Level -1 | 25 μg | ≥1 |
| Level 2 | 50 μg | ≥2 |
| Level 3 | 100 μg | ≥2 |
| Level 4 | 150 μg | ≥2 |

^{§}A minimum of 2 patients will be treated per cohort

[1577] Inclusion Criteria:

[1578] Cohort A:

[1579] Patients with histologically confirmed advanced (unresectable or metastatic) cMEL or cSCC who failed approved standard therapy or for whom no standard therapy is indicated

[1580] Not amenable to surgical resection or locoregional radiation therapy with curative intent

[1581] Progression on/after at least one line of therapy

[1582] or

[1583] Histologically confirmed recurrent or metastatic hnSCC

[1584] Not amenable to surgical resection or locoregional radiation therapy with curative intent

[1585] Progression documented radiologically (documentation of a new or progressive lesion on/after at least one line of therapy.

[1586] or

[1587] Histologically or cytologically confirmed ACC

[1588] Not amenable to surgical resection or locoregional radiation therapy with curative intent

[1589] Progression documented radiologically; on/after at least one line of therapy

[1590] or

[1591] Histologically confirmed recurrent or metastatic VSCC

[1592] Not amenable to surgery, radio- or radiochemotherapy with curative intent

[1593] Not a candidate for standard systemic therapies

[1594] or

[1595] Relapsed or refractory CTCL, mycosis fungoides (MF) subtype

[1596] Diagnosis based upon standard staging classification system

[1597] MF without CD30⁺ large cell transformation and no evidence of visceral involvement

[1598] Relapsed, refractory or progressed after at least one prior treatment

[1599] Part B: Expansion Cohort

[1600] After completion of Part A, patients with advanced cSCC, ACC, VSCC, or CTCL-MF are enrolled to separate expansion cohorts at the previously defined recommended dose to further characterize the tolerability and safety profile of intratumorally administered RNAdjuvant in these patient populations and to collect pre-liminary evidence of anti-tumor activity. Part B should enrol up to 10 patients per expansion cohort. Inclusion criteria:

[1601] Cohort B:

[1602] Expansion cohorts B1, B2

[1603] Patients with histologically confirmed advanced (unresectable/metastatic) cSCC (B1) or ACC (B2) who failed standard therapy or for whom no standard therapy is indicated

[1604] Not amenable to curative locoregional treatments

[1605] Progression on/after at least one line of therapy (radiological documentation required for ACC)

[1606] Expansion cohort B3

[1607] Histologically confirmed recurrent or metastatic VSCC

[1608] Not amenable to surgery, radio- or radiochemotherapy with curative intent

[1609] Not a candidate for standard systemic therapies

[1610] Expansion cohort B4

[1611] Relapsed or refractory CTCL, mycosis fungoides (MF) subtype

[1612] Diagnosis based upon standard staging classification system

[1613] MF without CD30+large cell transformation and no evidence of visceral involvement

[1614] Relapsed, refractory or progressed after at least one prior treatment

[1615] Part C: Dose Escalation of RNAdjuvant in Combination with Anti-PD-1 Therapy in Patients with Advanced cMEL or HNSCC

[1616] Part C enrols patients with advanced cMEL or HNSCC currently receiving anti-PD-1 therapy. Patients must have stable disease or slowly progressive disease after at least 12 weeks of anti-PD-1 therapy prior to application of RNAjuvant. Cohorts of at least 2 patients are treated sequentially at escalating doses of RNAdjuvant. The dose escalation and the determination of the MTD and RCD (“recommended combination dose”) are guided by a 5 parameter bayesian logistic regression model with overdose control.

[1617] Dose escalation in Part C starts as soon as at least 3 doses of RNAdjuvant have been evaluated in Part A. Starting dose in Part C is 25 μg (see Table 14).

[1618] Inclusion Criteria:

[1619] Cohorts C and D:

[1620] Histologically confirmed advanced (unresectable or metastatic) cMEL in Cohorts C and D1

[1621] Currently receiving standard anti-PD-1 therapy according to the Summary of Product Characteristics (SPC)

[1622] Stable or slowly progressing disease after at least 12 weeks of anti-PD-1 therapy according to investigator assessment Intention to continue current anti-PD-1 therapy due to an assumed clinical benefit by continued anti-PD-1 therapy according to investigators judgement

[1623] Histologically confirmed recurrent or metastatic hnSCC in Cohorts C and D2

[1624] Currently receiving standard anti-PD-1 therapy according to the SPC

[1625] Stable or slowly progressing disease after at least 12 weeks of anti-PD-1 therapy, defined as follows:

[1626] Stable disease according to irRECIST

[1627] Stable disease requires a less than or equal 5% decrease in disease (defined as 5% regression in measurable dimension of disease) during an interval of at least 12 weeks prior to Day 1

[1628] Intention to continue current anti-PD-1 therapy due to an assumed clinical benefit according to investigators judgement

[1629] Part D: Expansion Cohort of RNAdjuvant in Combination with Anti-PD-1 Therapy in Patients with Advanced cMEL or HNSCC.

[1630] Once the RCD (“recommended combination dose”) has been established in Part C, the expansion Part D enrols additional patients with advanced cMEL or HNSCC on treatment with a PD-1 antagonist (refer to eligibility requirements Part C) to further characterize the tolerability and the safety profile and to evaluate the anti-tumor activity of the combination therapy. Part D should enrol about 21 patients.

[1631] Part 2 (Will be Performed as Separate Clinical Trial)

[1632] Phase I, open label, cohort based dose escalation & expansion study of intratumorally administered RNAdjuvant and RNArt with or without systemic anti-PD-1 treatment in patients percutaneously accessible solid tumors or lymphoma.

[1633] Basically, the design of the phase I clinical trial of RNArt+RNadjuvnat corresponds to the design of the Phase I study of RNAdjuvant (Part 1). The range of tolerated dose combinations will first be investigated using a dose-escalation procedure (cohort A). RNart, comprising 5 RNA compounds encoding IL-12, CD40L, soluble PD-1 an the two chains of anti-CTLA-4, will be increased stepwise while RNADjuvnat will be kept at fixed dose of 25 μg. RNArt and RNadjuvnat will be given simultaneously to the same tumor lesion. Dose escalation methodology is similar to Part 1, Cohort A (Bayesian dose-escalation approach). The administration schedule corresponds to the schedule of RNADjuvant described above (i.e 5×weekly followed by 3 addition injectgions Q2W).

[1634] The dose escalation part (Cohort A) includes the indications listed in Part 1, plus the following additional indications: Patients with

[1635] Human Papilloma virus related advanced tumors, including advanced, recurrent or metastatic vulvar squamous cell carcinoma, cervical cancer, or vaginal cancer

[1636] Not amenable to surgery, radio- or radiochemotherapy with curative intent

[1637] Not a candidate for standard systemic therapies

[1638] or

[1639] Follicular low-grade Non-Hodgkin's lymphoma

[1640] Either treatment naïve or relapsed or refractory following at least one prior treatment

[1641] Not requiring active therapy (asymptomatic, watchful waiting patients)

[1642] or

[1643] Nodal marginal zone B cell lymphoma

[1644] Either treatment naïve or relapsed or refractory following at least one prior treatment

[1645] Not requiring active therapy (asymptomatic, watchful waiting patients)

[1646] or

[1647] Primary cutaneous anaplastic large-cell lymphoma

[1648] Relapsed, refractory or progressed after at least one prior treatment or for whom no other therapy options are available or

[1649] Histologically confirmed advanced, recurrent or metastatic adult soft tissue sarcoma

[1650] Not amenable to surgery or other treatment options with curative intent

[1651] At least one line of prior systemic therapy or sarcoma histological subtypes for which there is no known standard systemic therapy

[1652] or

[1653] Histologically confirmed advanced (unresectable or metastatic) basal cell carcinoma of the skin

[1654] Not amendable to surgery of any other treatment options with curative intent

[1655] Not a Candidate for Systemic Therapy

[1656] Cohort B: Expansion Cohort

[1657] For indications please refer to Part 1, Expansion cohort B

[1658] Cohort C: Dose Escalation of RNart+RNAdjuvant in Combination with Anti-PD-1 Therapy in Patients with Advanced cMEL, HNSCC or cSCC

[1659] As in the Phase I study with RNAdjuvant, Part C enrols patients with advanced cMEL or HNSCC. Depending on whether an anti-PD-1 antobidy will be approved for treatment of advanced cSCC at the time of start of Cohort C, patients with cSCC will be also enrolled into this cohort. Patients must have stable disease or slowly progressive disease after at least 12 weeks of anti-PD-1 therapy prior to application of RNArt+RNAjuvant. RNart, comprising 4 RNA compounds encoding IL-12, CD40L and the two chains of anti-CTLA-4, will be increased stepwise while RNAdjuvnat will be kept at fixed dose of 25 μg. For the dose escalation methodology please refer to Part 1, Dohort C.

[1660] Inclusion Criteria:

[1661] Cohorts C and D:

[1662] Include the indications listed in Part 1, Cohorts C and D. Depending on the approval status of anti-PD-1 antibodies, the following patients will be enrolled to these cohorts:

[1663] Histologically confirmed advanced (unresectable or metastatic) cSCC

[1664] Currently receiving standard anti-PD-1 therapy according to the Summary of Product Characteristics (SPC)

[1665] Stable or slowly progressing disease after at least 12 weeks of anti-PD-1 therapy according to investigator assessment Intention to continue current anti-PD-1 therapy due to an assumed clinical benefit by continued anti-PD-1 therapy according to investigators judgement

[1666] Experiment 13: Expression of Single RNArt Constructs in A375 Human Melanoma Cells

[1667] A375 cells were seeded in 24-well plates at a density of 50 000 cells/well. After 24 hours cells were transfected with the indicated amounts of RNA and lipofectamine 2000 (Invitrogen) in a constant RNA:lipofectamine ratio of 1:2. After 5 hours the supernatants were collected and 1 ml fresh medium was added. After further 24 hours of incubation supernatants were again collected. Translated mRNA Products of IL12, solPD1 and anti-CTLA4 antibody were measured in the supernatant.

[1668] Human IL12 content in the supernatants was measured with the Human IL-12p70 DuoSet Kit, R&D Systems, Cat: DY1270 according to the manufacturer's protocol using 1:10, 1:100 and 1:1000 dilutions of the supernatants (see FIG. 10).

[1669] Human PD1 ELISA is done in duplicates with the Human PD1 DuoSet Kit, R&D Systems, Cat: DY1086, according to the manufacturer's protocol using 1:10, 1:100 and 1:1000 dilutions of the supernatants (see FIG. 11).

[1670] Human anit-CTLA4 IgG1 ELISA is done in duplicates with Rituximab Antibody for standard (Goat Anti-Human IgG (SouthernBiotech Cat. No: 2044-01, c=1 mg/ml, 1:1000) and Goat Anti-Human IgG Biotin (Dianova Cat. No: 109065088-01, 1:20000) using 1:10, 1:100 and 1:1000 dilutions of the supernatants (see FIG. 12).

[1671] For detection of membrane bound CD40LG protein A375 cells were seeded in 6-well plates at a density of 130 000 cells/well. After 24 hours cells were transfected with the indicated amounts of RNA and lipofectamine 2000 (Invitrogen) in a constant RNA:lipofectamine ratio of 1:2. After 24 hours of incubation cells were collected and cell surface staining was done with CD154 anti-human APC (BD Pharmingen). Finally cell surface expression of CD40LG was analyzed by flow cytometry (see FIG. 13).

TABLE 15
RNA constructs

| RNA | Description | SEQ ID NO: |
|---|---|---|
| R2025 | Non-coding immunostimulatory RNA | 433 |
| | (RNAdjuvant) | |
| R5448/R5939 | mRNA encoding human IL-12 | 598 |
| | (hIL-12 (GC)) | |
| R5447/R5938 | mRNA encoding human soluble PD-1 | 597 |
| | (human solPD1 (GC)) | |
| R5446/R5990 | mRNA encoding human CD40LG | 596 |
| | (CD40LG (GC)) | |
| R5417 | mRNA encoding heavy chain (HC) of anti-CTLA4 antibody | 594 |
| | (HC anit-CTLA4 Ab (GC)) | |
| R5418 | mRNA encoding light chain (LC) of anti-CTLA4 antibody | 595 |
| | (HLC anit-CTLA4 Ab (GC)) | |

The application's sequence listing, which the Patent Office published only in electronic form, follows.

SEQUENCE LISTING (1079 sequences)

SEQ ID NO: 1 - protein, 288 aa, Artificial Sequence
  PDCD1
MQIPQAPWPVVWAVLQLGWRPGWFLDSPDRPWNPPTFSPALLVVTEGDNATFTCSFSNTSESFVLNWYRMSPSNQTDKLAAFPEDRSQPGQDCRFRVTQLPNGRDFHMSVVRARRNDSGTYLCGAISLAPKAQIKESLRAELRVTERRAEVPTAHPSPSPRPAGQFQTLVVGVVGGLLGSLVLLVWVLAVICSRAARGTIGARRTGQPLKEDPSAVPVFSVDYGELDFQWREKTPEPPVPCVPEQTEYATIVFPSGMGTSSPARRGSADGPRSAQPLRPEDGHCSWPL

SEQ ID NO: 2 - protein, 149 aa, Artificial Sequence
  PDCD1(1-149)
MQIPQAPWPVVWAVLQLGWRPGWFLDSPDRPWNPPTFSPALLVVTEGDNATFTCSFSNTSESFVLNWYRMSPSNQTDKLAAFPEDRSQPGQDCRFRVTQLPNGRDFHMSVVRARRNDSGTYLCGAISLAPKAQIKESLRAELRVTERRA

SEQ ID NO: 3 - protein, 219 aa, Artificial Sequence
  IL12A
MCPARSLLLVATLVLLDHLSLARNLPVATPDPGMFPCLHHSQNLLRAVSNMLQKARQTLEFYPCTSEEIDHEDITKDKTSTVEACLPLELTKNESCLNSRETSFITNGSCLASRKTSFMMALCLSSIYEDLKMYQVEFKTMNAKLLMDPKRQIFLDQNMLAVIDELMQALNFNSETVPQKSSLEEPDFYKTKIKLCILLHAFRIRAVTIDRVMSYLNAS

SEQ ID NO: 4 - protein, 219 aa, Artificial Sequence; identical to SEQ ID NO: 3
  IL12A(1-219)

SEQ ID NO: 5 - protein, 197 aa, Artificial Sequence
  IL12A(23-219)
RNLPVATPDPGMFPCLHHSQNLLRAVSNMLQKARQTLEFYPCTSEEIDHEDITKDKTSTVEACLPLELTKNESCLNSRETSFITNGSCLASRKTSFMMALCLSSIYEDLKMYQVEFKTMNAKLLMDPKRQIFLDQNMLAVIDELMQALNFNSETVPQKSSLEEPDFYKTKIKLCILLHAFRIRAVTIDRVMSYLNAS

SEQ ID NO: 6 - protein, 328 aa, Artificial Sequence
  IL12B
MCHQQLVISWFSLVFLASPLVAIWELKKDVYVVELDWYPDAPGEMVVLTCDTPEEDGITWTLDQSSEVLGSGKTLTIQVKEFGDAGQYTCHKGGEVLSHSLLLLHKKEDGIWSTDILKDQKEPKNKTFLRCEAKNYSGRFTCWWLTTISTDLTFSVKSSRGSSDPQGVTCGAATLSAERVRGDNKEYEYSVECQEDSACPAAEESLPIEVMVDAVHKLKYENYTSSFFIRDIIKPDPPKNLQLKPLKNSRQVEVSWEYPDTWSTPHSYFSLTFCVQVQGKSKREKKDRVFTDKTSATVICRKNASISVRAQDRYYSSSWSEWASVPCS

SEQ ID NO: 7 - protein, 328 aa, Artificial Sequence; identical to SEQ ID NO: 6
  IL12B(1-328)

SEQ ID NO: 8 - protein, 306 aa, Artificial Sequence
  IL12B(23-328)
IWELKKDVYVVELDWYPDAPGEMVVLTCDTPEEDGITWTLDQSSEVLGSGKTLTIQVKEFGDAGQYTCHKGGEVLSHSLLLLHKKEDGIWSTDILKDQKEPKNKTFLRCEAKNYSGRFTCWWLTTISTDLTFSVKSSRGSSDPQGVTCGAATLSAERVRGDNKEYEYSVECQEDSACPAAEESLPIEVMVDAVHKLKYENYTSSFFIRDIIKPDPPKNLQLKPLKNSRQVEVSWEYPDTWSTPHSYFSLTFCVQVQGKSKREKKDRVFTDKTSATVICRKNASISVRAQDRYYSSSWSEWASVPCS

SEQ ID NO: 9 - protein, 18 aa, Artificial Sequence
  Linker-sFvCC49-218
GSTSGSGKPGSGEGSTKG

SEQ ID NO: 10 - protein, 543 aa, Artificial Sequence
  IL12
MCHQQLVISWFSLVFLASPLVAIWELKKDVYVVELDWYPDAPGEMVVLTCDTPEEDGITWTLDQSSEVLGSGKTLTIQVKEFGDAGQYTCHKGGEVLSHSLLLLHKKEDGIWSTDILKDQKEPKNKTFLRCEAKNYSGRFTCWWLTTISTDLTFSVKSSRGSSDPQGVTCGAATLSAERVRGDNKEYEYSVECQEDSACPAAEESLPIEVMVDAVHKLKYENYTSSFFIRDIIKPDPPKNLQLKPLKNSRQVEVSWEYPDTWSTPHSYFSLTFCVQVQGKSKREKKDRVFTDKTSATVICRKNASISVRAQDRYYSSSWSEWASVPCSGSTSGSGKPGSGEGSTKGRNLPVATPDPGMFPCLHHSQNLLRAVSNMLQKARQTLEFYPCTSEEIDHEDITKDKTSTVEACLPLELTKNESCLNSRETSFITNGSCLASRKTSFMMALCLSSIYEDLKMYQVEFKTMNAKLLMDPKRQIFLDQNMLAVIDELMQALNFNSETVPQKSSLEEPDFYKTKIKLCILLHAFRIRAVTIDRVMSYLNAS

SEQ ID NO: 11 - protein, 261 aa, Artificial Sequence
  CD40LG
MIETYNQTSPRSAATGLPISMKIFMYLLTVFLITQMIGSALFAVYLHRRLDKIEDERNLHEDFVFMKTIQRCNTGERSLSLLNCEEIKSQFEGFVKDIMLNKEETKKENSFEMQKGDQNPQIAAHVISEASSKTTSVLQWAEKGYYTMSNNLVTLENGKQLTVKRQGLYYIYAQVTFCSNREASSQAPFIASLCLKSPGRFERILLRAANTHSSAKPCGQQSIHLGGVFELQPGASVFVNVTDPSQVSHGTGFTSFGLLKL

SEQ ID NO: 12 - RNA, 867 nt, Artificial Sequence
  PDCD1 CDS mRNA wild type
augcagaucccacaggcgcccuggccagucgucugggcggugcuacaacugggcuggcggccaggaugguucuuagacuccccagacaggcccuggaacccccccaccuucuccccagcccugcucguggugaccgaaggggacaacgccaccuucaccugcagcuucuccaacacaucggagagcuucgugcuaaacugguaccgcaugagccccagcaaccagacggacaagcuggccgcuuuccccgaggaccgcagccagcccggccaggacugccgcuuccgugucacacaacugcccaacgggcgugacuuccacaugagcguggucagggcccggcgcaaugacagcggcaccuaccucuguggggccaucucccuggcccccaaggcgcagaucaaagagagccugcgggcagagcucagggugacagagagaagggcagaagugcccacagcccaccccagccccucacccaggccagccggccaguuccaaacccuggugguuggugucgugggcggccugcugggcagccuggugcugcuagucuggguccuggccgucaucugcucccgggccgcacgagggacaauaggagccaggcgcaccggccagccccugaaggaggaccccucagccgugccuguguucucuguggacuauggggagcuggauuuccaguggcgagagaagaccccggagccccccgugcccugugucccugagcagacggaguaugccaccauugucuuuccuagcggaaugggcaccucaucccccgcccgcaggggcucagccgacggcccucggagugcccagccacugaggccugaggauggacacugcucuuggccccucuga

SEQ ID NO: 13 - RNA, 450 nt, Artificial Sequence
  PDCD1(1-149) CDS mRNA wild type
augcagaucccacaggcgcccuggccagucgucugggcggugcuacaacugggcuggcggccaggaugguucuuagacuccccagacaggcccuggaacccccccaccuucuccccagcccugcucguggugaccgaaggggacaacgccaccuucaccugcagcuucuccaacacaucggagagcuucgugcuaaacugguaccgcaugagccccagcaaccagacggacaagcuggccgcuuuccccgaggaccgcagccagcccggccaggacugccgcuuccgugucacacaacugcccaacgggcgugacuuccacaugagcguggucagggcccggcgcaaugacagcggcaccuaccucuguggggccaucucccuggcccccaaggcgcagaucaaagagagccugcgggcagagcucagggugacagagagaagggcauga

SEQ ID NO: 14 - RNA, 660 nt, Artificial Sequence
  IL12A CDS mRNA wild type
auguguccagcgcgcagccuccuccuuguggcuacccugguccuccuggaccaccucaguuuggccagaaaccuccccguggccacuccagacccaggaauguucccaugccuucaccacucccaaaaccugcugagggccgucagcaacaugcuccagaaggccagacaaacucuagaauuuuacccuugcacuucugaagagauugaucaugaagauaucacaaaagauaaaaccagcacaguggaggccuguuuaccauuggaauuaaccaagaaugagaguugccuaaauuccagagagaccucuuucauaacuaaugggaguugccuggccuccagaaagaccucuuuuaugauggcccugugccuuaguaguauuuaugaagacuugaagauguaccagguggaguucaagaccaugaaugcaaagcuucugauggauccuaagaggcagaucuuucuagaucaaaacaugcuggcaguuauugaugagcugaugcaggcccugaauuucaacagugagacugugccacaaaaauccucccuugaagaaccggauuuuuauaaaacuaaaaucaagcucugcauacuucuucaugcuuucagaauucgggcagugacuauugauagagugaugagcuaucugaaugcuuccuaa

SEQ ID NO: 15 - RNA, 657 nt, Artificial Sequence
  IL12A(1-219) CDS mRNA wild type
auguguccagcgcgcagccuccuccuuguggcuacccugguccuccuggaccaccucaguuuggccagaaaccuccccguggccacuccagacccaggaauguucccaugccuucaccacucccaaaaccugcugagggccgucagcaacaugcuccagaaggccagacaaacucuagaauuuuacccuugcacuucugaagagauugaucaugaagauaucacaaaagauaaaaccagcacaguggaggccuguuuaccauuggaauuaaccaagaaugagaguugccuaaauuccagagagaccucuuucauaacuaaugggaguugccuggccuccagaaagaccucuuuuaugauggcccugugccuuaguaguauuuaugaagacuugaagauguaccagguggaguucaagaccaugaaugcaaagcuucugauggauccuaagaggcagaucuuucuagaucaaaacaugcuggcaguuauugaugagcugaugcaggcccugaauuucaacagugagacugugccacaaaaauccucccuugaagaaccggauuuuuauaaaacuaaaaucaagcucugcauacuucuucaugcuuucagaauucgggcagugacuauugauagagugaugagcuaucugaaugcuucc

SEQ ID NO: 16 - RNA, 594 nt, Artificial Sequence
  IL12A(23-219) CDS mRNA wild type
agaaaccuccccguggccacuccagacccaggaauguucccaugccuucaccacucccaaaaccugcugagggccgucagcaacaugcuccagaaggccagacaaacucuagaauuuuacccuugcacuucugaagagauugaucaugaagauaucacaaaagauaaaaccagcacaguggaggccuguuuaccauuggaauuaaccaagaaugagaguugccuaaauuccagagagaccucuuucauaacuaaugggaguugccuggccuccagaaagaccucuuuuaugauggcccugugccuuaguaguauuuaugaagacuugaagauguaccagguggaguucaagaccaugaaugcaaagcuucugauggauccuaagaggcagaucuuucuagaucaaaacaugcuggcaguuauugaugagcugaugcaggcccugaauuucaacagugagacugugccacaaaaauccucccuugaagaaccggauuuuuauaaaacuaaaaucaagcucugcauacuucuucaugcuuucagaauucgggcagugacuauugauagagugaugagcuaucugaaugcuuccuaa

SEQ ID NO: 17 - RNA, 987 nt, Artificial Sequence
  IL12B CDS mRNA wild type
augugucaccagcaguuggucaucucuugguuuucccugguuuuucuggcaucuccccucguggccauaugggaacugaagaaagauguuuaugucguagaauuggauugguauccggaugccccuggagaaauggugguccucaccugugacaccccugaagaagaugguaucaccuggaccuuggaccagagcagugaggucuuaggcucuggcaaaacccugaccauccaagucaaagaguuuggagaugcuggccaguacaccugucacaaaggaggcgagguucuaagccauucgcuccugcugcuucacaaaaaggaagauggaauuugguccacugauauuuuaaaggaccagaaagaacccaaaaauaagaccuuucuaagaugcgaggccaagaauuauucuggacguuucaccugcugguggcugacgacaaucaguacugauuugacauucagugucaaaagcagcagaggcucuucugacccccaaggggugacgugcggagcugcuacacucucugcagagagagucagaggggacaacaaggaguaugaguacucaguggagugccaggaggacagugccugcccagcugcugaggagagucugcccauugaggucaugguggaugccguucacaagcucaaguaugaaaacuacaccagcagcuucuucaucagggacaucaucaaaccugacccacccaagaacuugcagcugaagccauuaaagaauucucggcagguggaggucagcugggaguacccugacaccuggaguacuccacauuccuacuucucccugacauucugcguucagguccagggcaagagcaagagagaaaagaaagauagagucuucacggacaagaccucagccacggucaucugccgcaaaaaugccagcauuagcgugcgggcccaggaccgcuacuauagcucaucuuggagcgaaugggcaucugugcccugcaguuag

SEQ ID NO: 18 - RNA, 984 nt, Artificial Sequence
  IL12B(1-328) CDS mRNA wild type
augugucaccagcaguuggucaucucuugguuuucccugguuuuucuggcaucuccccucguggccauaugggaacugaagaaagauguuuaugucguagaauuggauugguauccggaugccccuggagaaauggugguccucaccugugacaccccugaagaagaugguaucaccuggaccuuggaccagagcagugaggucuuaggcucuggcaaaacccugaccauccaagucaaagaguuuggagaugcuggccaguacaccugucacaaaggaggcgagguucuaagccauucgcuccugcugcuucacaaaaaggaagauggaauuugguccacugauauuuuaaaggaccagaaagaacccaaaaauaagaccuuucuaagaugcgaggccaagaauuauucuggacguuucaccugcugguggcugacgacaaucaguacugauuugacauucagugucaaaagcagcagaggcucuucugacccccaaggggugacgugcggagcugcuacacucucugcagagagagucagaggggacaacaaggaguaugaguacucaguggagugccaggaggacagugccugcccagcugcugaggagagucugcccauugaggucaugguggaugccguucacaagcucaaguaugaaaacuacaccagcagcuucuucaucagggacaucaucaaaccugacccacccaagaacuugcagcugaagccauuaaagaauucucggcagguggaggucagcugggaguacccugacaccuggaguacuccacauuccuacuucucccugacauucugcguucagguccagggcaagagcaagagagaaaagaaagauagagucuucacggacaagaccucagccacggucaucugccgcaaaaaugccagcauuagcgugcgggcccaggaccgcuacuauagcucaucuuggagcgaaugggcaucugugcccugcagu

SEQ ID NO: 19 - RNA, 921 nt, Artificial Sequence
  IL12B(23-328) CDS mRNA wild type
auaugggaacugaagaaagauguuuaugucguagaauuggauugguauccggaugccccuggagaaauggugguccucaccugugacaccccugaagaagaugguaucaccuggaccuuggaccagagcagugaggucuuaggcucuggcaaaacccugaccauccaagucaaagaguuuggagaugcuggccaguacaccugucacaaaggaggcgagguucuaagccauucgcuccugcugcuucacaaaaaggaagauggaauuugguccacugauauuuuaaaggaccagaaagaacccaaaaauaagaccuuucuaagaugcgaggccaagaauuauucuggacguuucaccugcugguggcugacgacaaucaguacugauuugacauucagugucaaaagcagcagaggcucuucugacccccaaggggugacgugcggagcugcuacacucucugcagagagagucagaggggacaacaaggaguaugaguacucaguggagugccaggaggacagugccugcccagcugcugaggagagucugcccauugaggucaugguggaugccguucacaagcucaaguaugaaaacuacaccagcagcuucuucaucagggacaucaucaaaccugacccacccaagaacuugcagcugaagccauuaaagaauucucggcagguggaggucagcugggaguacccugacaccuggaguacuccacauuccuacuucucccugacauucugcguucagguccagggcaagagcaagagagaaaagaaagauagagucuucacggacaagaccucagccacggucaucugccgcaaaaaugccagcauuagcgugcgggcccaggaccgcuacuauagcucaucuuggagcgaaugggcaucugugcccugcaguuag

SEQ ID NO: 20 - RNA, 54 nt, Artificial Sequence
  Linker-sFvCC49-218 CDS mRNA wild type
ggcaguacuucgggcagugguaagccugguaguggugaggguaguacuaagggu

SEQ ID NO: 21 - RNA, 1632 nt, Artificial Sequence
  IL12 CDS mRNA wild type
augugucaccagcaguuggucaucucuugguuuucccugguuuuucuggcaucuccccucguggccauaugggaacugaagaaagauguuuaugucguagaauuggauugguauccggaugccccuggagaaauggugguccucaccugugacaccccugaagaagaugguaucaccuggaccuuggaccagagcagugaggucuuaggcucuggcaaaacccugaccauccaagucaaagaguuuggagaugcuggccaguacaccugucacaaaggaggcgagguucuaagccauucgcuccugcugcuucacaaaaaggaagauggaauuugguccacugauauuuuaaaggaccagaaagaacccaaaaauaagaccuuucuaagaugcgaggccaagaauuauucuggacguuucaccugcugguggcugacgacaaucaguacugauuugacauucagugucaaaagcagcagaggcucuucugacccccaaggggugacgugcggagcugcuacacucucugcagagagagucagaggggacaacaaggaguaugaguacucaguggagugccaggaggacagugccugcccagcugcugaggagagucugcccauugaggucaugguggaugccguucacaagcucaaguaugaaaacuacaccagcagcuucuucaucagggacaucaucaaaccugacccacccaagaacuugcagcugaagccauuaaagaauucucggcagguggaggucagcugggaguacccugacaccuggaguacuccacauuccuacuucucccugacauucugcguucagguccagggcaagagcaagagagaaaagaaagauagagucuucacggacaagaccucagccacggucaucugccgcaaaaaugccagcauuagcgugcgggcccaggaccgcuacuauagcucaucuuggagcgaaugggcaucugugcccugcaguggcaguacuucgggcagugguaagccugguaguggugaggguaguacuaaggguagaaaccuccccguggccacuccagacccaggaauguucccaugccuucaccacucccaaaaccugcugagggccgucagcaacaugcuccagaaggccagacaaacucuagaauuuuacccuugcacuucugaagagauugaucaugaagauaucacaaaagauaaaaccagcacaguggaggccuguuuaccauuggaauuaaccaagaaugagaguugccuaaauuccagagagaccucuuucauaacuaaugggaguugccuggccuccagaaagaccucuuuuaugauggcccugugccuuaguaguauuuaugaagacuugaagauguaccagguggaguucaagaccaugaaugcaaagcuucugauggauccuaagaggcagaucuuucuagaucaaaacaugcuggcaguuauugaugagcugaugcaggcccugaauuucaacagugagacugugccacaaaaauccucccuugaagaaccggauuuuuauaaaacuaaaaucaagcucugcauacuucuucaugcuuucagaauucgggcagugacuauugauagagugaugagcuaucugaaugcuuccuaa

SEQ ID NO: 22 - RNA, 786 nt, Artificial Sequence
  CD40LG CDS mRNA wild type
augaucgaaacauacaaccaaacuucuccccgaucugcggccacuggacugcccaucagcaugaaaauuuuuauguauuuacuuacuguuuuucuuaucacccagaugauugggucagcacuuuuugcuguguaucuucauagaagguuggacaagauagaagaugaaaggaaucuucaugaagauuuuguauucaugaaaacgauacagagaugcaacacaggagaaagauccuuauccuuacugaacugugaggagauuaaaagccaguuugaaggcuuugugaaggauauaauguuaaacaaagaggagacgaagaaagaaaacagcuuugaaaugcaaaaaggugaucagaauccucaaauugcggcacaugucauaagugaggccagcaguaaaacaacaucuguguuacagugggcugaaaaaggauacuacaccaugagcaacaacuugguaacccuggaaaaugggaaacagcugaccguuaaaagacaaggacucuauuauaucuaugcccaagucaccuucuguuccaaucgggaagcuucgagucaagcuccauuuauagccagccucugccuaaagucccccgguagauucgagagaaucuuacucagagcugcaaauacccacaguuccgccaaaccuugcgggcaacaauccauucacuugggaggaguauuugaauugcaaccaggugcuucgguguuugucaaugugacugauccaagccaagugagccauggcacuggcuucacguccuuuggcuuacucaaacucuga

SEQ ID NO: 23 - RNA, 867 nt, Artificial Sequence
  PDCD1 CDS mRNA opt1
augcagaucccccaggccccguggcccguggucugggccgugcugcagcucggcuggcgccccgggugguuccuggacagccccgaccggccguggaacccgcccaccuucucccccgcgcugcucguggucaccgagggcgacaacgccacguucacgugcagcuucuccaacaccagcgaguccuucgugcugaacugguaccgcaugagccccuccaaccagaccgacaagcuggccgccuuccccgaggaccggagccagcccgggcaggacugccgcuuccgggugacccagcuccccaacggccgcgacuuccacauguccgucgugcgggcccgccggaacgacagcgggaccuaccugugcggcgcgaucucccuggccccgaaggcccagaucaaggagagccuccgcgccgagcugcgggugaccgagcgccgggcggagguccccaccgcccaccccucccccagcccgcgccccgccggccaguuccagacgcugguggugggggucgugggcgggcuccugggcucccuggugcuccuggucugggugcuggccgugaucugcagccgggccgcgcgcgggaccaucggcgcccggcgcaccggccagccccucaaggaggaccccuccgccgucccgguguucagcguggacuacggggagcuggacuuccaguggcgggagaagacccccgagccgcccguccccugcgugcccgagcagacggaguacgccaccaucguguuccccuccggcauggggaccagcagccccgcccgccggggcuccgcggacggcccgcgcagcgcccagccccugcgccccgaggacgggcacugcuccuggccgcucuga

SEQ ID NO: 24 - RNA, 450 nt, Artificial Sequence
  PDCD1(1-149) CDS mRNA opt1
augcagaucccccaggccccguggcccguggucugggccgugcugcagcucggcuggcgccccgggugguuccuggacagccccgaccggccguggaacccgcccaccuucucccccgcgcugcucguggucaccgagggcgacaacgccacguucacgugcagcuucuccaacaccagcgaguccuucgugcugaacugguaccgcaugagccccuccaaccagaccgacaagcuggccgccuuccccgaggaccggagccagcccgggcaggacugccgcuuccgggugacccagcuccccaacggccgcgacuuccacauguccgucgugcgggcccgccggaacgacagcgggaccuaccugugcggcgcgaucucccuggccccgaaggcccagaucaaggagagccuccgcgccgagcugcgggugaccgagcgccgggcguga

SEQ ID NO: 25 - RNA, 660 nt, Artificial Sequence
  IL12A CDS mRNA opt1
augugccccgcccgcagccugcuccugguggccacccugguccuccuggaccaccugucccucgcgcggaaccugccgguggccacccccgaccccggcauguuccccugccugcaccacagccagaaccuccugcgcgccguguccaacaugcugcagaaggcccggcagacgcucgaguucuacccgugcaccagcgaggagaucgaccacgaggacaucaccaaggacaagaccuccacggucgaggccugccugccccuggagcucaccaagaacgagagcugccugaacucccgcgagaccagcuucaucaccaacggguccugccuggcgagccggaagacguccuucaugauggcccucugccugagcuccaucuacgaggaccugaagauguaccagguggaguucaagaccaugaacgccaagcuccugauggaccccaagcgccagaucuuccuggaccagaacaugcucgccgugaucgacgagcugaugcaggcgcugaacuucaacagcgagaccgucccccagaaguccagccucgaggagccggacuucuacaagaccaagaucaagcugugcauccugcuccacgccuuccggauccgcgccgugacgaucgaccgggugauguccuaccugaacgccagcuga

SEQ ID NO: 26 - RNA, 657 nt, Artificial Sequence
  IL12A(1-219) CDS mRNA opt1
augugccccgcccgcagccugcuccugguggccacccugguccuccuggaccaccugucccucgcgcggaaccugccgguggccacccccgaccccggcauguuccccugccugcaccacagccagaaccuccugcgcgccguguccaacaugcugcagaaggcccggcagacgcucgaguucuacccgugcaccagcgaggagaucgaccacgaggacaucaccaaggacaagaccuccacggucgaggccugccugccccuggagcucaccaagaacgagagcugccugaacucccgcgagaccagcuucaucaccaacggguccugccuggcgagccggaagacguccuucaugauggcccucugccugagcuccaucuacgaggaccugaagauguaccagguggaguucaagaccaugaacgccaagcuccugauggaccccaagcgccagaucuuccuggaccagaacaugcucgccgugaucgacgagcugaugcaggcgcugaacuucaacagcgagaccgucccccagaaguccagccucgaggagccggacuucuacaagaccaagaucaagcugugcauccugcuccacgccuuccggauccgcgccgugacgaucgaccgggugauguccuaccugaacgccagc

SEQ ID NO: 27 - RNA, 594 nt, Artificial Sequence
  IL12A(23-219) CDS mRNA opt1
cggaaccugccgguggccacccccgaccccggcauguuccccugccugcaccacagccagaaccuccugcgcgccguguccaacaugcugcagaaggcccggcagacgcucgaguucuacccgugcaccagcgaggagaucgaccacgaggacaucaccaaggacaagaccuccacggucgaggccugccugccccuggagcucaccaagaacgagagcugccugaacucccgcgagaccagcuucaucaccaacggguccugccuggcgagccggaagacguccuucaugauggcccucugccugagcuccaucuacgaggaccugaagauguaccagguggaguucaagaccaugaacgccaagcuccugauggaccccaagcgccagaucuuccuggaccagaacaugcucgccgugaucgacgagcugaugcaggcgcugaacuucaacagcgagaccgucccccagaaguccagccucgaggagccggacuucuacaagaccaagaucaagcugugcauccugcuccacgccuuccggauccgcgccgugacgaucgaccgggugauguccuaccugaacgccagcuga

SEQ ID NO: 28 - RNA, 987 nt, Artificial Sequence
  IL12B CDS mRNA opt1
augugccaccagcagcuggugaucagcugguucucccucgucuuccuggccagcccccugguggccaucugggagcucaagaaggacguguacgucguggagcuggacugguacccggacgcgcccggcgagauggugguccugaccugcgacacccccgaggaggacgggaucacguggacccucgaccaguccagcgaggugcugggcuccgggaagacccugaccauccaggugaaggaguucggcgacgccgggcaguacacgugccacaagggcggcgagguccucagccacucccugcugcuccugcacaagaaggaggacgggaucuggagcaccgacauccugaaggaccagaaggagcccaagaacaagaccuuccuccgcugcgaggccaagaacuacuccggccgguucacgugcugguggcugaccaccaucagcaccgaccugaccuucuccgucaagagcucccgcgggagcuccgacccgcagggcgugacgugcggggccgccacccucagcgcggagcgggugcgcggcgacaacaaggaguacgaguacuccguggagugccaggaggacagcgccugccccgccgccgaggagucccugcccaucgaggugauggucgacgcggugcacaagcugaaguacgagaacuacaccagcagcuucuucauccgggacaucaucaagcccgacccgcccaagaaccuccagcugaagccccugaagaacucccgccagguggaggucagcugggaguaccccgacaccugguccacgccgcacagcuacuucucccucaccuucugcguccaggugcagggcaagagcaagcgggagaagaaggaccgcguguucaccgacaagaccuccgccacggugaucugccggaagaacgccagcaucuccgugcgcgcccaggaccgguacuacagcuccagcugguccgagugggccagcguccccugcuccuga

SEQ ID NO: 29 - RNA, 984 nt, Artificial Sequence
  IL12B(1-328) CDS mRNA opt1
augugccaccagcagcuggugaucagcugguucucccucgucuuccuggccagcccccugguggccaucugggagcucaagaaggacguguacgucguggagcuggacugguacccggacgcgcccggcgagauggugguccugaccugcgacacccccgaggaggacgggaucacguggacccucgaccaguccagcgaggugcugggcuccgggaagacccugaccauccaggugaaggaguucggcgacgccgggcaguacacgugccacaagggcggcgagguccucagccacucccugcugcuccugcacaagaaggaggacgggaucuggagcaccgacauccugaaggaccagaaggagcccaagaacaagaccuuccuccgcugcgaggccaagaacuacuccggccgguucacgugcugguggcugaccaccaucagcaccgaccugaccuucuccgucaagagcucccgcgggagcuccgacccgcagggcgugacgugcggggccgccacccucagcgcggagcgggugcgcggcgacaacaaggaguacgaguacuccguggagugccaggaggacagcgccugccccgccgccgaggagucccugcccaucgaggugauggucgacgcggugcacaagcugaaguacgagaacuacaccagcagcuucuucauccgggacaucaucaagcccgacccgcccaagaaccuccagcugaagccccugaagaacucccgccagguggaggucagcugggaguaccccgacaccugguccacgccgcacagcuacuucucccucaccuucugcguccaggugcagggcaagagcaagcgggagaagaaggaccgcguguucaccgacaagaccuccgccacggugaucugccggaagaacgccagcaucuccgugcgcgcccaggaccgguacuacagcuccagcugguccgagugggccagcguccccugcucc

SEQ ID NO: 30 - RNA, 921 nt, Artificial Sequence
  IL12B(23-328) CDS mRNA opt1
aucugggagcucaagaaggacguguacgucguggagcuggacugguacccggacgcgcccggcgagauggugguccugaccugcgacacccccgaggaggacgggaucacguggacccucgaccaguccagcgaggugcugggcuccgggaagacccugaccauccaggugaaggaguucggcgacgccgggcaguacacgugccacaagggcggcgagguccucagccacucccugcugcuccugcacaagaaggaggacgggaucuggagcaccgacauccugaaggaccagaaggagcccaagaacaagaccuuccuccgcugcgaggccaagaacuacuccggccgguucacgugcugguggcugaccaccaucagcaccgaccugaccuucuccgucaagagcucccgcgggagcuccgacccgcagggcgugacgugcggggccgccacccucagcgcggagcgggugcgcggcgacaacaaggaguacgaguacuccguggagugccaggaggacagcgccugccccgccgccgaggagucccugcccaucgaggugauggucgacgcggugcacaagcugaaguacgagaacuacaccagcagcuucuucauccgggacaucaucaagcccgacccgcccaagaaccuccagcugaagccccugaagaacucccgccagguggaggucagcugggaguaccccgacaccugguccacgccgcacagcuacuucucccucaccuucugcguccaggugcagggcaagagcaagcgggagaagaaggaccgcguguucaccgacaagaccuccgccacggugaucugccggaagaacgccagcaucuccgugcgcgcccaggaccgguacuacagcuccagcugguccgagugggccagcguccccugcuccuga

SEQ ID NO: 31 - RNA, 54 nt, Artificial Sequence
  Linker-sFvCC49-218 CDS mRNA opt1
ggcagcaccuccgggagcggcaagcccggguccggcgaggggagcaccaagggc

SEQ ID NO: 32 - RNA, 1632 nt, Artificial Sequence
  IL12 CDS mRNA opt1
augugccaccagcagcuggugaucagcugguucucccucgucuuccuggccagcccccugguggccaucugggagcucaagaaggacguguacgucguggagcuggacugguacccggacgcgcccggcgagauggugguccugaccugcgacacccccgaggaggacgggaucacguggacccucgaccaguccagcgaggugcugggcuccgggaagacccugaccauccaggugaaggaguucggcgacgccgggcaguacacgugccacaagggcggcgagguccucagccacucccugcugcuccugcacaagaaggaggacgggaucuggagcaccgacauccugaaggaccagaaggagcccaagaacaagaccuuccuccgcugcgaggccaagaacuacuccggccgguucacgugcugguggcugaccaccaucagcaccgaccugaccuucuccgucaagagcucccgcgggagcuccgacccgcagggcgugacgugcggggccgccacccucagcgcggagcgggugcgcggcgacaacaaggaguacgaguacuccguggagugccaggaggacagcgccugccccgccgccgaggagucccugcccaucgaggugauggucgacgcggugcacaagcugaaguacgagaacuacaccagcagcuucuucauccgggacaucaucaagcccgacccgcccaagaaccuccagcugaagccccugaagaacucccgccagguggaggucagcugggaguaccccgacaccugguccacgccgcacagcuacuucucccucaccuucugcguccaggugcagggcaagagcaagcgggagaagaaggaccgcguguucaccgacaagaccuccgccacggugaucugccggaagaacgccagcaucuccgugcgcgcccaggaccgguacuacagcuccagcugguccgagugggccagcguccccugcuccggcagcaccuccgggagcggcaagcccggguccggcgaggggagcaccaagggccggaaccugccgguggccacccccgaccccggcauguuccccugccugcaccacagccagaaccuccugcgcgccguguccaacaugcugcagaaggcccggcagacgcucgaguucuacccgugcaccagcgaggagaucgaccacgaggacaucaccaaggacaagaccuccacggucgaggccugccugccccuggagcucaccaagaacgagagcugccugaacucccgcgagaccagcuucaucaccaacggguccugccuggcgagccggaagacguccuucaugauggcccucugccugagcuccaucuacgaggaccugaagauguaccagguggaguucaagaccaugaacgccaagcuccugauggaccccaagcgccagaucuuccuggaccagaacaugcucgccgugaucgacgagcugaugcaggcgcugaacuucaacagcgagaccgucccccagaaguccagccucgaggagccggacuucuacaagaccaagaucaagcugugcauccugcuccacgccuuccggauccgcgccgugacgaucgaccgggugauguccuaccugaacgccagcuga

SEQ ID NO: 33 - RNA, 786 nt, Artificial Sequence
  CD40LG CDS mRNA opt1
augaucgagaccuacaaccagaccagcccccgcuccgccgccacgggccugccgaucagcaugaagaucuucauguaccuccugaccguguuccugaucacccagaugaucggguccgcgcuguucgccgucuaccugcaccggcgccuggacaagaucgaggacgagcggaaccuccacgaggacuucguguucaugaagaccauccagcgcugcaacacgggcgagcggagccugucccugcucaacugcgaggagaucaagagccaguucgagggguucgugaaggacaucaugcugaacaaggaggagaccaagaaggagaacuccuucgagaugcagaagggcgaccagaacccccagaucgccgcccacgucaucagcgaggccuccagcaagaccaccuccgugcugcagugggcggagaagggguacuacacgaugagcaacaaccucgugacccuggagaacggcaagcagcugaccgucaagcgccagggccucuacuacaucuacgcccaggugaccuucugcuccaaccgggaggccagcucccaggcccccuucaucgcgagccugugccugaagucccccgggcgcuucgagcggauccuccugcgcgccgccaacacgcacagcuccgccaagccgugcggccagcagagcauccaccucgggggcguguucgagcuccagcccggggccagcgucuucgugaacgugaccgaccccucccaggucagccacggcaccggcuucaccuccuucgggcugcugaagcucuga

SEQ ID NO: 34 - RNA, 867 nt, Artificial Sequence
  PDCD1 CDS mRNA opt2
augcagaucccccaggcccccuggcccgucgucugggccguccuccagcucggcuggcgccccggcugguuccucgacucccccgaccgccccuggaacccccccaccuucucccccgcccuccucgucgucaccgagggcgacaacgccaccuucaccuguuccuucuccaacaccuccgaguccuucguccucaacugguaccgcaugucccccuccaaccagaccgacaagcucgccgccuuccccgaggaccgcucccagcccggccaggacugccgcuuccgcgucacccagcuccccaacggccgcgacuuccacauguccgucguccgcgcccgccgcaacgacuccggcaccuaccucugcggcgccaucucccucgcccccaaggcccagaucaaggagucccuccgcgccgagcuccgcgucaccgagcgccgcgccgagguccccaccgcccaccccucccccuccccccgccccgccggccaguuccagacccucgucgucggcgucgucggcggccuccucggcucccucguccuccucgucuggguccucgccgucaucugcucccgcgccgcccgcggcaccaucggcgcccgccgcaccggccagccccucaaggaggaccccuccgccguccccgucuucuccgucgacuacggcgagcucgacuuccaguggcgcgagaagacccccgagccccccguccccugcguccccgagcagaccgaguacgccaccaucgucuuccccuccggcaugggcaccuccucccccgcccgccgcggcuccgccgacggcccccgcuccgcccagccccuccgccccgaggacggccacugcuccuggccccucuga

SEQ ID NO: 35 - RNA, 450 nt, Artificial Sequence
  PDCD1(1-149) CDS mRNA opt2
augcagaucccccaggcccccuggcccgucgucugggccguccuccagcucggcuggcgccccggcugguuccucgacucccccgaccgccccuggaacccccccaccuucucccccgcccuccucgucgucaccgagggcgacaacgccaccuucaccuguuccuucuccaacaccuccgaguccuucguccucaacugguaccgcaugucccccuccaaccagaccgacaagcucgccgccuuccccgaggaccgcucccagcccggccaggacugccgcuuccgcgucacccagcuccccaacggccgcgacuuccacauguccgucguccgcgcccgccgcaacgacuccggcaccuaccucugcggcgccaucucccucgcccccaaggcccagaucaaggagucccuccgcgccgagcuccgcgucaccgagcgccgcgccuga

SEQ ID NO: 36 - RNA, 660 nt, Artificial Sequence
  IL12A CDS mRNA opt2
augugccccgcccgcucccuccuccucgucgccacccucguccuccucgaccaccucucccucgcccgcaaccuccccgucgccacccccgaccccggcauguuccccugccuccaccacucccagaaccuccuccgcgccgucuccaacaugcuccagaaggcccgccagacccucgaguucuaccccugcaccuccgaggagaucgaccacgaggacaucaccaaggacaagaccuccaccgucgaggccugccucccccucgagcucaccaagaacgaguccugccucaacucccgcgagaccuccuucaucaccaacggcuccugccucgccucccgcaagaccuccuucaugauggcccucugccucuccuccaucuacgaggaccucaagauguaccaggucgaguucaagaccaugaacgccaagcuccucauggaccccaagcgccagaucuuccucgaccagaacaugcucgccgucaucgacgagcucaugcaggcccucaacuucaacuccgagaccgucccccagaaguccucccucgaggagcccgacuucuacaagaccaagaucaagcucugcauccuccuccacgccuuccgcauccgcgccgucaccaucgaccgcgucauguccuaccucaacgccuccuga

SEQ ID NO: 37 - RNA, 657 nt, Artificial Sequence
  IL12A(1-219) CDS mRNA opt2
augugccccgcccgcucccuccuccucgucgccacccucguccuccucgaccaccucucccucgcccgcaaccuccccgucgccacccccgaccccggcauguuccccugccuccaccacucccagaaccuccuccgcgccgucuccaacaugcuccagaaggcccgccagacccucgaguucuaccccugcaccuccgaggagaucgaccacgaggacaucaccaaggacaagaccuccaccgucgaggccugccucccccucgagcucaccaagaacgaguccugccucaacucccgcgagaccuccuucaucaccaacggcuccugccucgccucccgcaagaccuccuucaugauggcccucugccucuccuccaucuacgaggaccucaagauguaccaggucgaguucaagaccaugaacgccaagcuccucauggaccccaagcgccagaucuuccucgaccagaacaugcucgccgucaucgacgagcucaugcaggcccucaacuucaacuccgagaccgucccccagaaguccucccucgaggagcccgacuucuacaagaccaagaucaagcucugcauccuccuccacgccuuccgcauccgcgccgucaccaucgaccgcgucauguccuaccucaacgccucc

SEQ ID NO: 38 - RNA, 594 nt, Artificial Sequence
  IL12A(23-219) CDS mRNA opt2
cgcaaccuccccgucgccacccccgaccccggcauguuccccugccuccaccacucccagaaccuccuccgcgccgucuccaacaugcuccagaaggcccgccagacccucgaguucuaccccugcaccuccgaggagaucgaccacgaggacaucaccaaggacaagaccuccaccgucgaggccugccucccccucgagcucaccaagaacgaguccugccucaacucccgcgagaccuccuucaucaccaacggcuccugccucgccucccgcaagaccuccuucaugauggcccucugccucuccuccaucuacgaggaccucaagauguaccaggucgaguucaagaccaugaacgccaagcuccucauggaccccaagcgccagaucuuccucgaccagaacaugcucgccgucaucgacgagcucaugcaggcccucaacuucaacuccgagaccgucccccagaaguccucccucgaggagcccgacuucuacaagaccaagaucaagcucugcauccuccuccacgccuuccgcauccgcgccgucaccaucgaccgcgucauguccuaccucaacgccuccuga

SEQ ID NO: 39 - RNA, 987 nt, Artificial Sequence
  IL12B CDS mRNA opt2
augugccaccagcagcucgucaucuccugguucucccucgucuuccucgccuccccccucgucgccaucugggagcucaagaaggacgucuacgucgucgagcucgacugguaccccgacgcccccggcgagauggucguccucaccugugacacccccgaggaggacggcaucaccuggacccucgaccaguccuccgagguccucggcuccggcaagacccucaccauccaggucaaggaguucggcgacgccggccaguacaccugucacaagggcggcgagguccucucccacucccuccuccuccuccacaagaaggaggacggcaucugguccaccgacauccucaaggaccagaaggagcccaagaacaagaccuuccuccgcugcgaggccaagaacuacuccggccgcuucaccuguugguggcucaccaccaucuccaccgaccucaccuucuccgucaaguccucccgcggcuccuccgacccccagggcgucaccuguggcgccgccacccucuccgccgagcgcguccgcggcgacaacaaggaguacgaguacuccgucgagugccaggaggacuccgccugccccgccgccgaggagucccuccccaucgaggucauggucgacgccguccacaagcucaaguacgagaacuacaccuccuccuucuucauccgcgacaucaucaagcccgacccccccaagaaccuccagcucaagccccucaagaacucccgccaggucgaggucuccugggaguaccccgacaccugguccaccccccacuccuacuucucccucaccuucugcguccagguccagggcaaguccaagcgcgagaagaaggaccgcgucuucaccgacaagaccuccgccaccgucaucugccgcaagaacgccuccaucuccguccgcgcccaggaccgcuacuacuccuccuccugguccgagugggccuccguccccugcuccuga

SEQ ID NO: 40 - RNA, 984 nt, Artificial Sequence
  IL12B(1-328) CDS mRNA opt2
augugccaccagcagcucgucaucuccugguucucccucgucuuccucgccuccccccucgucgccaucugggagcucaagaaggacgucuacgucgucgagcucgacugguaccccgacgcccccggcgagauggucguccucaccugugacacccccgaggaggacggcaucaccuggacccucgaccaguccuccgagguccucggcuccggcaagacccucaccauccaggucaaggaguucggcgacgccggccaguacaccugucacaagggcggcgagguccucucccacucccuccuccuccuccacaagaaggaggacggcaucugguccaccgacauccucaaggaccagaaggagcccaagaacaagaccuuccuccgcugcgaggccaagaacuacuccggccgcuucaccuguugguggcucaccaccaucuccaccgaccucaccuucuccgucaaguccucccgcggcuccuccgacccccagggcgucaccuguggcgccgccacccucuccgccgagcgcguccgcggcgacaacaaggaguacgaguacuccgucgagugccaggaggacuccgccugccccgccgccgaggagucccuccccaucgaggucauggucgacgccguccacaagcucaaguacgagaacuacaccuccuccuucuucauccgcgacaucaucaagcccgacccccccaagaaccuccagcucaagccccucaagaacucccgccaggucgaggucuccugggaguaccccgacaccugguccaccccccacuccuacuucucccucaccuucugcguccagguccagggcaaguccaagcgcgagaagaaggaccgcgucuucaccgacaagaccuccgccaccgucaucugccgcaagaacgccuccaucuccguccgcgcccaggaccgcuacuacuccuccuccugguccgagugggccuccguccccugcucc

SEQ ID NO: 41 - RNA, 921 nt, Artificial Sequence
  IL12B(23-328) CDS mRNA opt2
aucugggagcucaagaaggacgucuacgucgucgagcucgacugguaccccgacgcccccggcgagauggucguccucaccugugacacccccgaggaggacggcaucaccuggacccucgaccaguccuccgagguccucggcuccggcaagacccucaccauccaggucaaggaguucggcgacgccggccaguacaccugucacaagggcggcgagguccucucccacucccuccuccuccuccacaagaaggaggacggcaucugguccaccgacauccucaaggaccagaaggagcccaagaacaagaccuuccuccgcugcgaggccaagaacuacuccggccgcuucaccuguugguggcucaccaccaucuccaccgaccucaccuucuccgucaaguccucccgcggcuccuccgacccccagggcgucaccuguggcgccgccacccucuccgccgagcgcguccgcggcgacaacaaggaguacgaguacuccgucgagugccaggaggacuccgccugccccgccgccgaggagucccuccccaucgaggucauggucgacgccguccacaagcucaaguacgagaacuacaccuccuccuucuucauccgcgacaucaucaagcccgacccccccaagaaccuccagcucaagccccucaagaacucccgccaggucgaggucuccugggaguaccccgacaccugguccaccccccacuccuacuucucccucaccuucugcguccagguccagggcaaguccaagcgcgagaagaaggaccgcgucuucaccgacaagaccuccgccaccgucaucugccgcaagaacgccuccaucuccguccgcgcccaggaccgcuacuacuccuccuccugguccgagugggccuccguccccugcuccuga

SEQ ID NO: 42 - RNA, 54 nt, Artificial Sequence
  Linker-sFvCC49-218 CDS mRNA opt2
ggcuccaccuccggcuccggcaagcccggcuccggcgagggcuccaccaagggc

SEQ ID NO: 43 - RNA, 1632 nt, Artificial Sequence
  IL12 CDS mRNA opt2
augugccaccagcagcucgucaucuccugguucucccucgucuuccucgccuccccccucgucgccaucugggagcucaagaaggacgucuacgucgucgagcucgacugguaccccgacgcccccggcgagauggucguccucaccugugacacccccgaggaggacggcaucaccuggacccucgaccaguccuccgagguccucggcuccggcaagacccucaccauccaggucaaggaguucggcgacgccggccaguacaccugucacaagggcggcgagguccucucccacucccuccuccuccuccacaagaaggaggacggcaucugguccaccgacauccucaaggaccagaaggagcccaagaacaagaccuuccuccgcugcgaggccaagaacuacuccggccgcuucaccuguugguggcucaccaccaucuccaccgaccucaccuucuccgucaaguccucccgcggcuccuccgacccccagggcgucaccuguggcgccgccacccucuccgccgagcgcguccgcggcgacaacaaggaguacgaguacuccgucgagugccaggaggacuccgccugccccgccgccgaggagucccuccccaucgaggucauggucgacgccguccacaagcucaaguacgagaacuacaccuccuccuucuucauccgcgacaucaucaagcccgacccccccaagaaccuccagcucaagccccucaagaacucccgccaggucgaggucuccugggaguaccccgacaccugguccaccccccacuccuacuucucccucaccuucugcguccagguccagggcaaguccaagcgcgagaagaaggaccgcgucuucaccgacaagaccuccgccaccgucaucugccgcaagaacgccuccaucuccguccgcgcccaggaccgcuacuacuccuccuccugguccgagugggccuccguccccugcuccggcuccaccuccggcuccggcaagcccggcuccggcgagggcuccaccaagggccgcaaccuccccgucgccacccccgaccccggcauguuccccugccuccaccacucccagaaccuccuccgcgccgucuccaacaugcuccagaaggcccgccagacccucgaguucuaccccugcaccuccgaggagaucgaccacgaggacaucaccaaggacaagaccuccaccgucgaggccugccucccccucgagcucaccaagaacgaguccugccucaacucccgcgagaccuccuucaucaccaacggcuccugccucgccucccgcaagaccuccuucaugauggcccucugccucuccuccaucuacgaggaccucaagauguaccaggucgaguucaagaccaugaacgccaagcuccucauggaccccaagcgccagaucuuccucgaccagaacaugcucgccgucaucgacgagcucaugcaggcccucaacuucaacuccgagaccgucccccagaaguccucccucgaggagcccgacuucuacaagaccaagaucaagcucugcauccuccuccacgccuuccgcauccgcgccgucaccaucgaccgcgucauguccuaccucaacgccuccuga

SEQ ID NO: 44 - RNA, 786 nt, Artificial Sequence
  CD40LG CDS mRNA opt2
augaucgagaccuacaaccagaccuccccccgcuccgccgccaccggccuccccaucuccaugaagaucuucauguaccuccucaccgucuuccucaucacccagaugaucggcuccgcccucuucgccgucuaccuccaccgccgccucgacaagaucgaggacgagcgcaaccuccacgaggacuucgucuucaugaagaccauccagcgcugcaacaccggcgagcgcucccucucccuccucaacugcgaggagaucaagucccaguucgagggcuucgucaaggacaucaugcucaacaaggaggagaccaagaaggagaacuccuucgagaugcagaagggcgaccagaacccccagaucgccgcccacgucaucuccgaggccuccuccaagaccaccuccguccuccagugggccgagaagggcuacuacaccauguccaacaaccucgucacccucgagaacggcaagcagcucaccgucaagcgccagggccucuacuacaucuacgcccaggucaccuucugcuccaaccgcgaggccuccucccaggcccccuucaucgccucccucugccucaagucccccggccgcuucgagcgcauccuccuccgcgccgccaacacccacuccuccgccaagcccugcggccagcaguccauccaccucggcggcgucuucgagcuccagcccggcgccuccgucuucgucaacgucaccgaccccucccaggucucccacggcaccggcuucaccuccuucggccuccucaagcucuga

SEQ ID NO: 45 - RNA, 867 nt, Artificial Sequence
  PDCD1 CDS mRNA opt3
augcagaucccccaagccccuuggccaguggucugggcuguucugcagcucggcuggagaccggggugguuccuugacagccccgauaggccuuggaacccacccaccuuuuccccugcacuguuggugguaacagagggagacaaugccacuuucacgugcucuuuuucaaacaccagugagagcuucguguuaaauugguaccggauguccccaucuaaccagacagauaagcuggcggcuuuucccgaagaccgcucgcagccuggucaagauugucgauuccgugucacucagcuaccaaauggcagagacuuucacaugucagugguuagggcccggcgcaacgauagcgggaccuaucucugcggagcaauuagucuggccccgaaagcucagauaaaggaaucccuuagagcagagcugagggugacagaacggcgcgccgagguccccaccgcucauccuucuccaagcccccgaccugccggccaguuccaaacuuuggugguagguguugucgggggacuccugggcucccuggugcucuuagugugggugcuggcggucaucuguucaagagcagccaggggcacaauuggggcucggcguaccggacagccacuuaaagaggaccccagugccguuccgguguuuagcguagauuacggugaauuggacuuccaguggcgcgagaagacgccugaacccccagugccuugcguccccgagcagacugaguaugcaaccaucguguuuccaucuggcauggggacauccucacccgcuagaaggggaagcgccgauggcccucggagugcgcaaccacugcgaccggaagacggucacuguucuuggccccuauga

SEQ ID NO: 46 - RNA, 450 nt, Artificial Sequence
  PDCD1(1-149) CDS mRNA opt3
augcagaucccccaagccccuuggccaguggucugggcuguucugcagcucggcuggagaccggggugguuccuugacagccccgauaggccuuggaacccacccaccuuuuccccugcacuguuggugguaacagagggagacaaugccacuuucacgugcucuuuuucaaacaccagugagagcuucguguuaaauugguaccggauguccccaucuaaccagacagauaagcuggcggcuuuucccgaagaccgcucgcagccuggucaagauugucgauuccgugucacucagcuaccaaauggcagagacuuucacaugucagugguuagggcccggcgcaacgauagcgggaccuaucucugcggagcaauuagucuggccccgaaagcucagauaaaggaaucccuuagagcagagcugagggugacagaacggcgcgccuga

SEQ ID NO: 47 - RNA, 660 nt, Artificial Sequence
  IL12A CDS mRNA opt3
augugccccgccagaagccugcuccuuguggcuacccuggucuuguuagaccaccugucccuagcaaggaaccucccuguugccacaccagauccgggcauguuccccugucugcaucacucucagaaucuucugcgggcggugucaaacauguugcaaaaggcucgccagacucucgaguuuuacccuugcacgagugaagagaucgaccaugaagauauuaccaaagacaagacaagcacuguagaggccugucugccacuggaacucaccaaaaaugaguccugcuuaaacucucgagagacaucguucauaaccaaugggucaugucuggcaagccguaagacaaguuuuaugauggcccuuugcuuguccucuaucuaugaagaucugaaaauguaccagguggaguucaagacuaugaacgcuaagcuacucauggaccccaaaagacagauuuuucuggaucaaaauaugcuugcagucaucgacgaacugaugcaggccuugaacuucaauagcgagaccgugccucagaaguccucacucgaggaaccagauuuuuauaaaacgaagauuaaacuguguaucuuacugcacgcuuucaggauacgggccguuacuaucgaccgcgugaugaguuaccucaacgcgagcuga

SEQ ID NO: 48 - RNA, 657 nt, Artificial Sequence
  IL12A(1-219) CDS mRNA opt3
augugccccgccagaagccugcuccuuguggcuacccuggucuuguuagaccaccugucccuagcaaggaaccucccuguugccacaccagauccgggcauguuccccugucugcaucacucucagaaucuucugcgggcggugucaaacauguugcaaaaggcucgccagacucucgaguuuuacccuugcacgagugaagagaucgaccaugaagauauuaccaaagacaagacaagcacuguagaggccugucugccacuggaacucaccaaaaaugaguccugcuuaaacucucgagagacaucguucauaaccaaugggucaugucuggcaagccguaagacaaguuuuaugauggcccuuugcuuguccucuaucuaugaagaucugaaaauguaccagguggaguucaagacuaugaacgcuaagcuacucauggaccccaaaagacagauuuuucuggaucaaaauaugcuugcagucaucgacgaacugaugcaggccuugaacuucaauagcgagaccgugccucagaaguccucacucgaggaaccagauuuuuauaaaacgaagauuaaacuguguaucuuacugcacgcuuucaggauacgggccguuacuaucgaccgcgugaugaguuaccucaacgcgagc

SEQ ID NO: 49 - RNA, 594 nt, Artificial Sequence
  IL12A(23-219) CDS mRNA opt3
aggaaccucccuguugccacaccagauccgggcauguuccccugucugcaucacucucagaaucuucugcgggcggugucaaacauguugcaaaaggcucgccagacucucgaguuuuacccuugcacgagugaagagaucgaccaugaagauauuaccaaagacaagacaagcacuguagaggccugucugccacuggaacucaccaaaaaugaguccugcuuaaacucucgagagacaucguucauaaccaaugggucaugucuggcaagccguaagacaaguuuuaugauggcccuuugcuuguccucuaucuaugaagaucugaaaauguaccagguggaguucaagacuaugaacgcuaagcuacucauggaccccaaaagacagauuuuucuggaucaaaauaugcuugcagucaucgacgaacugaugcaggccuugaacuucaauagcgagaccgugccucagaaguccucacucgaggaaccagauuuuuauaaaacgaagauuaaacuguguaucuuacugcacgcuuucaggauacgggccguuacuaucgaccgcgugaugaguuaccucaacgcgagcuga

SEQ ID NO: 50 - RNA, 987 nt, Artificial Sequence
  IL12B CDS mRNA opt3
augugccaccagcaacuggugaucagcugguucucccucgucuuucuugccucuccccugguugcuauuugggaguugaagaaagacguguacguaguggaauuagauugguauccugacgcaccaggcgagauggucgugcugaccugugauacaccggaagaggacgggauaacuuggacgcuagaucagucaagugaaguucucggaagcgguaagacccugacaauccaggugaaagaguucggcgacgccgggcaguacacuugccauaagggaggcgagguccuuucccacucucuguugcuccugcauaaaaaggaagaugguauuuggucgaccgacauccugaaggaucaaaaagagcccaagaacaaaacauuucucagaugugaagcgaagaauuauucagggagguuuaccugcuggugguuaacuacaauuagcaccgaccugacguucagugugaaauccucucggggaagcuccgauccucagggcguaacuuguggcgcugccacccuuucagcagagcgcguucgaggggacaacaaggaguacgaauauaguguggagugccaggaagauagcgccuguccagcugcagaggaaucuuugcccaucgaggucaugguggacgccgugcacaagcugaaauacgagaauuauacauccucauucuuuauacgugacaucauuaagccugauccacccaaaaaccuacagcucaagccucugaaaaauagcagacaagucgaaguuaguugggaguacccagacacuuggucuaccccgcauuccuacuucagccuuacauuuugcgugcagguacagggaaagucgaaaagggaaaagaaggaucggguguucaccgacaaaacgucugcuacugucaucugucgcaagaacgccuccauuucagugagagcgcaggauagguauuacaguagcuccuggucugagugggcaagcguucccugcucauga

SEQ ID NO: 51 - RNA, 984 nt, Artificial Sequence
  IL12B(1-328) CDS mRNA opt3
augugccaccagcaacuggugaucagcugguucucccucgucuuucuugccucuccccugguugcuauuugggaguugaagaaagacguguacguaguggaauuagauugguauccugacgcaccaggcgagauggucgugcugaccugugauacaccggaagaggacgggauaacuuggacgcuagaucagucaagugaaguucucggaagcgguaagacccugacaauccaggugaaagaguucggcgacgccgggcaguacacuugccauaagggaggcgagguccuuucccacucucuguugcuccugcauaaaaaggaagaugguauuuggucgaccgacauccugaaggaucaaaaagagcccaagaacaaaacauuucucagaugugaagcgaagaauuauucagggagguuuaccugcuggugguuaacuacaauuagcaccgaccugacguucagugugaaauccucucggggaagcuccgauccucagggcguaacuuguggcgcugccacccuuucagcagagcgcguucgaggggacaacaaggaguacgaauauaguguggagugccaggaagauagcgccuguccagcugcagaggaaucuuugcccaucgaggucaugguggacgccgugcacaagcugaaauacgagaauuauacauccucauucuuuauacgugacaucauuaagccugauccacccaaaaaccuacagcucaagccucugaaaaauagcagacaagucgaaguuaguugggaguacccagacacuuggucuaccccgcauuccuacuucagccuuacauuuugcgugcagguacagggaaagucgaaaagggaaaagaaggaucggguguucaccgacaaaacgucugcuacugucaucugucgcaagaacgccuccauuucagugagagcgcaggauagguauuacaguagcuccuggucugagugggcaagcguucccugcuca

SEQ ID NO: 52 - RNA, 921 nt, Artificial Sequence
  IL12B(23-328) CDS mRNA opt3
auuugggaguugaagaaagacguguacguaguggaauuagauugguauccugacgcaccaggcgagauggucgugcugaccugugauacaccggaagaggacgggauaacuuggacgcuagaucagucaagugaaguucucggaagcgguaagacccugacaauccaggugaaagaguucggcgacgccgggcaguacacuugccauaagggaggcgagguccuuucccacucucuguugcuccugcauaaaaaggaagaugguauuuggucgaccgacauccugaaggaucaaaaagagcccaagaacaaaacauuucucagaugugaagcgaagaauuauucagggagguuuaccugcuggugguuaacuacaauuagcaccgaccugacguucagugugaaauccucucggggaagcuccgauccucagggcguaacuuguggcgcugccacccuuucagcagagcgcguucgaggggacaacaaggaguacgaauauaguguggagugccaggaagauagcgccuguccagcugcagaggaaucuuugcccaucgaggucaugguggacgccgugcacaagcugaaauacgagaauuauacauccucauucuuuauacgugacaucauuaagccugauccacccaaaaaccuacagcucaagccucugaaaaauagcagacaagucgaaguuaguugggaguacccagacacuuggucuaccccgcauuccuacuucagccuuacauuuugcgugcagguacagggaaagucgaaaagggaaaagaaggaucggguguucaccgacaaaacgucugcuacugucaucugucgcaagaacgccuccauuucagugagagcgcaggauagguauuacaguagcuccuggucugagugggcaagcguucccugcucauga

SEQ ID NO: 53 - RNA, 54 nt, Artificial Sequence
  Linker-sFvCC49-218 CDS mRNA opt3
ggcagcaccuccgggucuggaaagcccgguucaggcgaggggaguacaaaagga

SEQ ID NO: 54 - RNA, 1632 nt, Artificial Sequence
  IL12 CDS mRNA opt3
augugccaccagcaacuggugaucagcugguucucccucgucuuucuugccucuccccugguugcuauuugggaguugaagaaagacguguacguaguggaauuagauugguauccugacgcaccaggcgagauggucgugcugaccugugauacaccggaagaggacgggauaacuuggacgcuagaucagucaagugaaguucucggaagcgguaagacccugacaauccaggugaaagaguucggcgacgccgggcaguacacuugccauaagggaggcgagguccuuucccacucucuguugcuccugcauaaaaaggaagaugguauuuggucgaccgacauccugaaggaucaaaaagagcccaagaacaaaacauuucucagaugugaagcgaagaauuauucagggagguuuaccugcuggugguuaacuacaauuagcaccgaccugacguucagugugaaauccucucggggaagcuccgauccucagggcguaacuuguggcgcugccacccuuucagcagagcgcguucgaggggacaacaaggaguacgaauauaguguggagugccaggaagauagcgccuguccagcugcagaggaaucuuugcccaucgaggucaugguggacgccgugcacaagcugaaauacgagaauuauacauccucauucuuuauacgugacaucauuaagccugauccacccaaaaaccuacagcucaagccucugaaaaauagcagacaagucgaaguuaguugggaguacccagacacuuggucuaccccgcauuccuacuucagccuuacauuuugcgugcagguacagggaaagucgaaaagggaaaagaaggaucggguguucaccgacaaaacgucugcuacugucaucugucgcaagaacgccuccauuucagugagagcgcaggauagguauuacaguagcuccuggucugagugggcaagcguucccugcucaggcagcaccuccgggucuggaaagcccgguucaggcgaggggaguacaaaaggaaggaaccucccuguugccacaccagauccgggcauguuccccugucugcaucacucucagaaucuucugcgggcggugucaaacauguugcaaaaggcucgccagacucucgaguuuuacccuugcacgagugaagagaucgaccaugaagauauuaccaaagacaagacaagcacuguagaggccugucugccacuggaacucaccaaaaaugaguccugcuuaaacucucgagagacaucguucauaaccaaugggucaugucuggcaagccguaagacaaguuuuaugauggcccuuugcuuguccucuaucuaugaagaucugaaaauguaccagguggaguucaagacuaugaacgcuaagcuacucauggaccccaaaagacagauuuuucuggaucaaaauaugcuugcagucaucgacgaacugaugcaggccuugaacuucaauagcgagaccgugccucagaaguccucacucgaggaaccagauuuuuauaaaacgaagauuaaacuguguaucuuacugcacgcuuucaggauacgggccguuacuaucgaccgcgugaugaguuaccucaacgcgagcuga

SEQ ID NO: 55 - RNA, 786 nt, Artificial Sequence
  CD40LG CDS mRNA opt3
augaucgagaccuacaaccagacaagccccagauccgccgcuacuggccugccuauuucuaugaagauauucauguaucuccuuacgguguuucugaucacccaaaugauugggucagcauuguucgccgucuacuuacacaggcggcuggacaaaaucgaagaugagcgcaaucuacaugaagacuuuguuuucaugaagacaauucagcgaugcaacacuggagagcguagucucagccugcuuaauugugaagagaucaaaucccaguuugaggguuucgugaaggauauaaugcugaacaaagaagagaccaagaaggaaaauucuuuugagaugcagaaaggcgaccaaaacccacagaucgcggcucacguaauuucggaggccucaagcaagacaaccaguguguugcagugggcagaaaaaggguauuacacuauguccaauaaccucgucacacuggagaauggaaagcagcugaccgugaaaagacaaggccucuauuacaucuaugcccagguuacguucugcucuaacagggaagcuagcucccaggcaccguuuauugccucauuaugucugaagagucccggucgguucgagcgcauccuuuugagagcugccaauacucauagcucugcgaagccuugcgggcagcaauccauacaccugggaggcguguuugaacuacagccaggcgcaucagucuucgugaacguaaccgaucccagccagguuagucaugggacaggauuuacuucuuucggucuccugaaacuuuga

SEQ ID NO: 56 - RNA, 867 nt, Artificial Sequence
  PDCD1 CDS mRNA opt3v
augcagaucccucaggcuccuuggccuguugugugggcuguucugcaacuuggauggcggccuggcugguuccuggacucuccugacagacccuggaauccuccaacauucagccccgcucugcuggugguuaccgagggcgauaaugccaccuucaccuguagcuucagcaacaccagcgagagcuucgugcugaacugguacagaaugagccccagcaaccagaccgacaagcuggccgccuuuccugaggauagaucucagcccggccaggacugccgguucagaguuacacagcugcccaacggccgggacuuccacaugucugucguccgggccagaagaaacgacagcggcacauaucugugcggcgccauuucucuggccccuaaggcucagaucaaagagagccugagagccgagcugagagugacagaaagacgggccgaagugcccacagcucacccuucaccuucuccaagaccugccggccaguuccagacacuggucgugggaguuguuggcggacugcugggaucucuggugcugcuuguuugggugcucgccgugaucuguagcagagccgccagaggaacaaucggcgccagaaggacaggccagccucugaaagaggaucccucugcuguccccguguucagcguggacuauggcgagcuggauuuccaguggcgggaaaagacacccgagccuccagugccuugugugccugagcagacagaguacgccaccaucguguucccuagcggcaugggcacaucuagcccugccagaagaggaucugccgacggaccuagaucugcccagccucucagaccugaggauggccacuguagcuggccucuguaa

SEQ ID NO: 57 - RNA, 450 nt, Artificial Sequence
  PDCD1(1-149) CDS mRNA opt3v
augcagaucccucaggcuccuuggccuguugugugggcuguucugcaacuuggauggcggccuggcugguuccuggacucuccugacagacccuggaauccuccaacauucagccccgcucugcuggugguuaccgagggcgauaaugccaccuucaccuguagcuucagcaacaccagcgagagcuucgugcugaacugguacagaaugagccccagcaaccagaccgacaagcuggccgccuuuccugaggauagaucucagcccggccaggacugccgguucagaguuacacagcugcccaacggccgggacuuccacaugucugucguccgggccagaagaaacgacagcggcacauaucugugcggcgccauuucucuggccccuaaggcucagaucaaagagagccugagagccgagcugagagugacagaaagacgggccuga

SEQ ID NO: 58 - RNA, 660 nt, Artificial Sequence
  IL12A CDS mRNA opt3v
augugcccugccagaucucugcugcugguggcuacacuggugcugcuggaucaucugagccuggccagaaaccugccaguggccacgccugauccuggcauguuuccuugucugcaccacagccagaaccugcugagagccguguccaacaugcugcagaaggccagacagacccucgaguucuaccccugcaccagcgaggaaaucgaccacgaggacaucaccaaggacaagaccagcaccguggaagccugccugccucuggaacugaccaagaacgagagcugccugaacagccgggaaaccagcuucaucaccaacggcucuugccuggccuccagaaagaccuccuucaugauggcccugugccugagcagcaucuacgaggaccugaagauguaccaggucgaguucaagaccaugaacgccaagcugcugauggaccccaagcggcagaucuuccuggaccagaauaugcuggccgugaucgacgagcugaugcaggcccugaacuucaacagcgagacagugccccagaaguccagccuggaagaacccgacuucuacaagaccaagaucaagcugugcauccugcugcacgccuuccggaucagagccgugaccaucgacagagugaugagcuaccugaacgccuccuga

SEQ ID NO: 59 - RNA, 657 nt, Artificial Sequence
  IL12A(1-219) CDS mRNA opt3v
augugcccugccagaucucugcugcugguggcuacacuggugcugcuggaucaucugagccuggccagaaaccugccaguggccacgccugauccuggcauguuuccuugucugcaccacagccagaaccugcugagagccguguccaacaugcugcagaaggccagacagacccucgaguucuaccccugcaccagcgaggaaaucgaccacgaggacaucaccaaggacaagaccagcaccguggaagccugccugccucuggaacugaccaagaacgagagcugccugaacagccgggaaaccagcuucaucaccaacggcucuugccuggccuccagaaagaccuccuucaugauggcccugugccugagcagcaucuacgaggaccugaagauguaccaggucgaguucaagaccaugaacgccaagcugcugauggaccccaagcggcagaucuuccuggaccagaauaugcuggccgugaucgacgagcugaugcaggcccugaacuucaacagcgagacagugccccagaaguccagccuggaagaacccgacuucuacaagaccaagaucaagcugugcauccugcugcacgccuuccggaucagagccgugaccaucgacagagugaugagcuaccugaacgccucc

SEQ ID NO: 60 - RNA, 594 nt, Artificial Sequence
  IL12A(23-219) CDS mRNA opt3v
agaaaccugccaguggccacgccugauccuggcauguuuccuugucugcaccacagccagaaccugcugagagccguguccaacaugcugcagaaggccagacagacccucgaguucuaccccugcaccagcgaggaaaucgaccacgaggacaucaccaaggacaagaccagcaccguggaagccugccugccucuggaacugaccaagaacgagagcugccugaacagccgggaaaccagcuucaucaccaacggcucuugccuggccuccagaaagaccuccuucaugauggcccugugccugagcagcaucuacgaggaccugaagauguaccaggucgaguucaagaccaugaacgccaagcugcugauggaccccaagcggcagaucuuccuggaccagaauaugcuggccgugaucgacgagcugaugcaggcccugaacuucaacagcgagacagugccccagaaguccagccuggaagaacccgacuucuacaagaccaagaucaagcugugcauccugcugcacgccuuccggaucagagccgugaccaucgacagagugaugagcuaccugaacgccuccuga

SEQ ID NO: 61 - RNA, 987 nt, Artificial Sequence
  IL12B CDS mRNA opt3v
augugucaccagcagcuggucaucagcugguucagccugguguuccuggccucuccucugguggccaucugggagcugaagaaagacguguacgugguggaacuggacugguaucccgaugcuccuggcgagaugguggugcugaccugcgauaccccugaagaggacggcaucaccuggacacuggaucagucuagcgaggugcucggcagcggcaagacccugaccauccaagugaaagaguuuggcgacgccggccaguacaccugucacaaaggcggagaagugcugagccacagccugcugcugcuccacaagaaagaggauggcauuuggagcaccgacauccugaaggaccagaaagagcccaagaacaagaccuuccugagaugcgaggccaagaacuacagcggccgguucacauguugguggcugaccaccaucagcaccgaccugaccuucagcgugaaguccagcagaggcagcagugauccucagggcguuacauguggcgccgcuacacugucugccgaaagagugcggggcgacaacaaagaauacgaguacagcguggaaugccaagaggacagcgccuguccagccgccgaagagucucugccuaucgaagugaugguggacgccgugcacaagcugaaguacgagaacuacaccuccagcuuuuucauccgggacaucaucaagcccgauccuccaaagaaccugcagcugaagccucugaagaacagcagacagguggaaguguccugggaguaccccgacaccuggucuacaccccacagcuacuucagccugaccuuuugcgugcaagugcagggcaaguccaagcgcgagaaaaaggaccggguguucaccgacaagaccagcgccaccgugaucugcagaaagaacgccagcaucagcgucagagcccaggaccgguacuacagcagcucuuggagcgaaugggccagcgugccauguagcuaa

SEQ ID NO: 62 - RNA, 984 nt, Artificial Sequence
  IL12B(1-328) CDS mRNA opt3v
augugucaccagcagcuggucaucagcugguucagccugguguuccuggccucuccucugguggccaucugggagcugaagaaagacguguacgugguggaacuggacugguaucccgaugcuccuggcgagaugguggugcugaccugcgauaccccugaagaggacggcaucaccuggacacuggaucagucuagcgaggugcucggcagcggcaagacccugaccauccaagugaaagaguuuggcgacgccggccaguacaccugucacaaaggcggagaagugcugagccacagccugcugcugcuccacaagaaagaggauggcauuuggagcaccgacauccugaaggaccagaaagagcccaagaacaagaccuuccugagaugcgaggccaagaacuacagcggccgguucacauguugguggcugaccaccaucagcaccgaccugaccuucagcgugaaguccagcagaggcagcagugauccucagggcguuacauguggcgccgcuacacugucugccgaaagagugcggggcgacaacaaagaauacgaguacagcguggaaugccaagaggacagcgccuguccagccgccgaagagucucugccuaucgaagugaugguggacgccgugcacaagcugaaguacgagaacuacaccuccagcuuuuucauccgggacaucaucaagcccgauccuccaaagaaccugcagcugaagccucugaagaacagcagacagguggaaguguccugggaguaccccgacaccuggucuacaccccacagcuacuucagccugaccuuuugcgugcaagugcagggcaaguccaagcgcgagaaaaaggaccggguguucaccgacaagaccagcgccaccgugaucugcagaaagaacgccagcaucagcgucagagcccaggaccgguacuacagcagcucuuggagcgaaugggccagcgugccauguagc

SEQ ID NO: 63 - RNA, 921 nt, Artificial Sequence
  IL12B(23-328) CDS mRNA opt3v
aucugggagcugaagaaagacguguacgugguggaacuggacugguaucccgaugcuccuggcgagaugguggugcugaccugcgauaccccugaagaggacggcaucaccuggacacuggaucagucuagcgaggugcucggcagcggcaagacccugaccauccaagugaaagaguuuggcgacgccggccaguacaccugucacaaaggcggagaagugcugagccacagccugcugcugcuccacaagaaagaggauggcauuuggagcaccgacauccugaaggaccagaaagagcccaagaacaagaccuuccugagaugcgaggccaagaacuacagcggccgguucacauguugguggcugaccaccaucagcaccgaccugaccuucagcgugaaguccagcagaggcagcagugauccucagggcguuacauguggcgccgcuacacugucugccgaaagagugcggggcgacaacaaagaauacgaguacagcguggaaugccaagaggacagcgccuguccagccgccgaagagucucugccuaucgaagugaugguggacgccgugcacaagcugaaguacgagaacuacaccuccagcuuuuucauccgggacaucaucaagcccgauccuccaaagaaccugcagcugaagccucugaagaacagcagacagguggaaguguccugggaguaccccgacaccuggucuacaccccacagcuacuucagccugaccuuuugcgugcaagugcagggcaaguccaagcgcgagaaaaaggaccggguguucaccgacaagaccagcgccaccgugaucugcagaaagaacgccagcaucagcgucagagcccaggaccgguacuacagcagcucuuggagcgaaugggccagcgugccauguagcuaa

SEQ ID NO: 64 - RNA, 54 nt, Artificial Sequence
  Linker-sFvCC49-218 CDS mRNA opt3v
ggcucuacaucuggcucuggcaaaccuggaucuggcgagggcucuacaaagggc

SEQ ID NO: 65 - RNA, 1632 nt, Artificial Sequence
  IL12 CDS mRNA opt3v
augugucaccagcagcuggucaucagcugguucagccugguguuccuggccucuccucugguggccaucugggagcugaagaaagacguguacgugguggaacuggacugguaucccgaugcuccuggcgagaugguggugcugaccugcgauaccccugaagaggacggcaucaccuggacacuggaucagucuagcgaggugcucggcagcggcaagacccugaccauccaagugaaagaguuuggcgacgccggccaguacaccugucacaaaggcggagaagugcugagccacagccugcugcugcuccacaagaaagaggauggcauuuggagcaccgacauccugaaggaccagaaagagcccaagaacaagaccuuccugagaugcgaggccaagaacuacagcggccgguucacauguugguggcugaccaccaucagcaccgaccugaccuucagcgugaaguccagcagaggcagcagugauccucagggcguuacauguggcgccgcuacacugucugccgaaagagugcggggcgacaacaaagaauacgaguacagcguggaaugccaagaggacagcgccuguccagccgccgaagagucucugccuaucgaagugaugguggacgccgugcacaagcugaaguacgagaacuacaccuccagcuuuuucauccgggacaucaucaagcccgauccuccaaagaaccugcagcugaagccucugaagaacagcagacagguggaaguguccugggaguaccccgacaccuggucuacaccccacagcuacuucagccugaccuuuugcgugcaagugcagggcaaguccaagcgcgagaaaaaggaccggguguucaccgacaagaccagcgccaccgugaucugcagaaagaacgccagcaucagcgucagagcccaggaccgguacuacagcagcucuuggagcgaaugggccagcgugccauguagcggcucuacaucuggcucuggcaaaccuggaucuggcgagggcucuacaaagggcagaaaccugccaguggccacgccugauccuggcauguuuccuugucugcaccacagccagaaccugcugagagccguguccaacaugcugcagaaggccagacagacccucgaguucuaccccugcaccagcgaggaaaucgaccacgaggacaucaccaaggacaagaccagcaccguggaagccugccugccucuggaacugaccaagaacgagagcugccugaacagccgggaaaccagcuucaucaccaacggcucuugccuggccuccagaaagaccuccuucaugauggcccugugccugagcagcaucuacgaggaccugaagauguaccaggucgaguucaagaccaugaacgccaagcugcugauggaccccaagcggcagaucuuccuggaccagaauaugcuggccgugaucgacgagcugaugcaggcccugaacuucaacagcgagacagugccccagaaguccagccuggaagaacccgacuucuacaagaccaagaucaagcugugcauccugcugcacgccuuccggaucagagccgugaccaucgacagagugaugagcuaccugaacgccuccuga

SEQ ID NO: 66 - RNA, 786 nt, Artificial Sequence
  CD40LG CDS mRNA opt3v
augaucgagacauacaaccagacaagccccagaagcgccgccacaggacugccuaucagcaugaagaucuuuauguaccugcugaccguguuccugaucacccagaugaucggcagcgcccuguuugccguguaccugcacagacggcuggacaagaucgaggacgagagaaaccugcacgaggacuucguguucaugaagaccauccagcggugcaacaccggcgagagaagucugagccugcugaacugcgaggaaaucaagagccaguucgagggcuucgugaaggacaucaugcugaacaaagaggaaacgaagaaagaaaacuccuucgagaugcagaagggcgaccagaauccucagaucgccgcucacgugaucagcgaggccagcagcaagacaacaagcgugcugcagugggccgagaagggcuacuacaccaugagcaacaaccuggucacccuggaaaacggcaagcagcugacagugaagcggcagggccuguacuacaucuacgcccaagugaccuucugcagcaacagagaggccagcucucaggccccuuuuaucgccagccugugccugaaguccccuggcagauucgagcggauucugcugagagccgccaacacacacagcagcgccaaaccuuguggccagcagucuauucaccucggcggaguguuugagcugcagccuggcgcaagcguguucgugaaugugacagacccuagccaggugucccacggcaccggcuuuacaucuuucggacugcugaagcuguga

SEQ ID NO: 67 - RNA, 867 nt, Artificial Sequence
  PDCD1 CDS mRNA opt4
augcagaucccccaggcccccuggcccguggugugggccgugcugcagcugggcuggagacccggcugguuccuggacagccccgacagacccuggaacccccccaccuucagccccgcccugcugguggugaccgagggcgacaacgccaccuucaccuguagcuucagcaacaccagcgagagcuucgugcugaacugguacagaaugagccccagcaaccagaccgacaagcuggccgccuuccccgaggacagaagccagcccggccaggacugcagauucagagugacccagcugcccaacggcagagacuuccacaugagcguggugagagccagaagaaacgacagcggcaccuaccugugcggcgccaucagccuggcccccaaggcccagaucaaggagagccugagagccgagcugagagugaccgagagaagggccgaggugcccaccgcccaccccagccccagccccagacccgccggccaguuccagacccugguggugggcguggugggcggccugcugggcagccuggugcugcuggugugggugcuggccgugaucugcagcagagccgccagaggcaccaucggcgccagaagaaccggccagccccugaaggaggaccccagcgccgugcccguguucagcguggacuacggcgagcuggacuuccaguggagagagaagacccccgagccccccgugcccugcgugcccgagcagaccgaguacgccaccaucguguuccccagcggcaugggcaccagcagccccgccagaagaggcagcgccgacggccccagaagcgcccagccccugagacccgaggacggccacugcagcuggccccuguga

SEQ ID NO: 68 - RNA, 450 nt, Artificial Sequence
  PDCD1(1-149) CDS mRNA opt4
augcagaucccccaggcccccuggcccguggugugggccgugcugcagcugggcuggagacccggcugguuccuggacagccccgacagacccuggaacccccccaccuucagccccgcccugcugguggugaccgagggcgacaacgccaccuucaccuguagcuucagcaacaccagcgagagcuucgugcugaacugguacagaaugagccccagcaaccagaccgacaagcuggccgccuuccccgaggacagaagccagcccggccaggacugcagauucagagugacccagcugcccaacggcagagacuuccacaugagcguggugagagccagaagaaacgacagcggcaccuaccugugcggcgccaucagccuggcccccaaggcccagaucaaggagagccugagagccgagcugagagugaccgagagaagggccuga

SEQ ID NO: 69 - RNA, 660 nt, Artificial Sequence
  IL12A CDS mRNA opt4
augugccccgccagaagccugcugcugguggccacccuggugcugcuggaccaccugagccuggccagaaaccugcccguggccacccccgaccccggcauguuccccugccugcaccacagccagaaccugcugagagccgugagcaacaugcugcagaaggccagacagacccuggaguucuaccccugcaccagcgaggagaucgaccacgaggacaucaccaaggacaagaccagcaccguggaggccugccugccccuggagcugaccaagaacgagagcugccugaacagcagagagaccagcuucaucaccaacggcagcugccuggccagcagaaagaccagcuucaugauggcccugugccugagcagcaucuacgaggaccugaagauguaccagguggaguucaagaccaugaacgccaagcugcugauggaccccaagagacagaucuuccuggaccagaacaugcuggccgugaucgacgagcugaugcaggcccugaacuucaacagcgagaccgugccccagaagaguagccuggaggagcccgacuucuacaagaccaagaucaagcugugcauccugcugcacgccuucagaaucagagccgugaccaucgacagagugaugagcuaccugaacgccagcuga

SEQ ID NO: 70 - RNA, 657 nt, Artificial Sequence
  IL12A(1-219) CDS mRNA opt4
augugccccgccagaagccugcugcugguggccacccuggugcugcuggaccaccugagccuggccagaaaccugcccguggccacccccgaccccggcauguuccccugccugcaccacagccagaaccugcugagagccgugagcaacaugcugcagaaggccagacagacccuggaguucuaccccugcaccagcgaggagaucgaccacgaggacaucaccaaggacaagaccagcaccguggaggccugccugccccuggagcugaccaagaacgagagcugccugaacagcagagagaccagcuucaucaccaacggcagcugccuggccagcagaaagaccagcuucaugauggcccugugccugagcagcaucuacgaggaccugaagauguaccagguggaguucaagaccaugaacgccaagcugcugauggaccccaagagacagaucuuccuggaccagaacaugcuggccgugaucgacgagcugaugcaggcccugaacuucaacagcgagaccgugccccagaagaguagccuggaggagcccgacuucuacaagaccaagaucaagcugugcauccugcugcacgccuucagaaucagagccgugaccaucgacagagugaugagcuaccugaacgccagc

SEQ ID NO: 71 - RNA, 594 nt, Artificial Sequence
  IL12A(23-219) CDS mRNA opt4
agaaaccugcccguggccacccccgaccccggcauguuccccugccugcaccacagccagaaccugcugagagccgugagcaacaugcugcagaaggccagacagacccuggaguucuaccccugcaccagcgaggagaucgaccacgaggacaucaccaaggacaagaccagcaccguggaggccugccugccccuggagcugaccaagaacgagagcugccugaacagcagagagaccagcuucaucaccaacggcagcugccuggccagcagaaagaccagcuucaugauggcccugugccugagcagcaucuacgaggaccugaagauguaccagguggaguucaagaccaugaacgccaagcugcugauggaccccaagagacagaucuuccuggaccagaacaugcuggccgugaucgacgagcugaugcaggcccugaacuucaacagcgagaccgugccccagaagaguagccuggaggagcccgacuucuacaagaccaagaucaagcugugcauccugcugcacgccuucagaaucagagccgugaccaucgacagagugaugagcuaccugaacgccagcuga

SEQ ID NO: 72 - RNA, 987 nt, Artificial Sequence
  IL12B CDS mRNA opt4
augugccaccagcagcuggugaucagcugguucagccugguguuccuggccagcccccugguggccaucugggagcugaagaaggacguguacgugguggagcuggacugguaccccgacgcccccggcgagaugguggugcugaccugcgacacccccgaggaggacggcaucaccuggacccuggaccagagcagcgaggugcugggcagcggcaagacccugaccauccaggugaaggaguucggcgacgccggccaguacaccugucacaagggcggcgaggugcugagccacagccugcugcugcugcacaagaaggaggacggcaucuggagcaccgacauccugaaggaccagaaggagcccaagaacaagaccuuccugagaugcgaggccaagaacuacagcggcagauucaccuguugguggcugaccaccaucagcaccgaccugaccuucagcgugaagaguagcagaggcagcagcgacccccagggcgugaccugcggcgccgccacccugagcgccgagagagugagaggcgacaacaaggaguacgaguacagcguggagugccaggaggacagcgccugccccgccgccgaggagagccugcccaucgaggugaugguggacgccgugcacaagcugaaguacgagaacuacaccagcagcuucuucaucagagacaucaucaagcccgacccccccaagaaccugcagcugaagccccugaagaacagcagacagguggaggugagcugggaguaccccgacaccuggagcaccccccacagcuacuucagccugaccuucugcgugcagguucagggcaagagcaagagagagaagaaggacagaguguucaccgacaagaccagcgccaccgugaucugcagaaagaacgccagcaucagcgugagagcccaggacagauacuacagcagcagcuggagcgagugggccagcgugcccugcagcuga

SEQ ID NO: 73 - RNA, 984 nt, Artificial Sequence
  IL12B(1-328) CDS mRNA opt4
augugccaccagcagcuggugaucagcugguucagccugguguuccuggccagcccccugguggccaucugggagcugaagaaggacguguacgugguggagcuggacugguaccccgacgcccccggcgagaugguggugcugaccugcgacacccccgaggaggacggcaucaccuggacccuggaccagagcagcgaggugcugggcagcggcaagacccugaccauccaggugaaggaguucggcgacgccggccaguacaccugucacaagggcggcgaggugcugagccacagccugcugcugcugcacaagaaggaggacggcaucuggagcaccgacauccugaaggaccagaaggagcccaagaacaagaccuuccugagaugcgaggccaagaacuacagcggcagauucaccuguugguggcugaccaccaucagcaccgaccugaccuucagcgugaagaguagcagaggcagcagcgacccccagggcgugaccugcggcgccgccacccugagcgccgagagagugagaggcgacaacaaggaguacgaguacagcguggagugccaggaggacagcgccugccccgccgccgaggagagccugcccaucgaggugaugguggacgccgugcacaagcugaaguacgagaacuacaccagcagcuucuucaucagagacaucaucaagcccgacccccccaagaaccugcagcugaagccccugaagaacagcagacagguggaggugagcugggaguaccccgacaccuggagcaccccccacagcuacuucagccugaccuucugcgugcagguucagggcaagagcaagagagagaagaaggacagaguguucaccgacaagaccagcgccaccgugaucugcagaaagaacgccagcaucagcgugagagcccaggacagauacuacagcagcagcuggagcgagugggccagcgugcccugcagc

SEQ ID NO: 74 - RNA, 921 nt, Artificial Sequence
  IL12B(23-328) CDS mRNA opt4
aucugggagcugaagaaggacguguacgugguggagcuggacugguaccccgacgcccccggcgagaugguggugcugaccugcgacacccccgaggaggacggcaucaccuggacccuggaccagagcagcgaggugcugggcagcggcaagacccugaccauccaggugaaggaguucggcgacgccggccaguacaccugucacaagggcggcgaggugcugagccacagccugcugcugcugcacaagaaggaggacggcaucuggagcaccgacauccugaaggaccagaaggagcccaagaacaagaccuuccugagaugcgaggccaagaacuacagcggcagauucaccuguugguggcugaccaccaucagcaccgaccugaccuucagcgugaagaguagcagaggcagcagcgacccccagggcgugaccugcggcgccgccacccugagcgccgagagagugagaggcgacaacaaggaguacgaguacagcguggagugccaggaggacagcgccugccccgccgccgaggagagccugcccaucgaggugaugguggacgccgugcacaagcugaaguacgagaacuacaccagcagcuucuucaucagagacaucaucaagcccgacccccccaagaaccugcagcugaagccccugaagaacagcagacagguggaggugagcugggaguaccccgacaccuggagcaccccccacagcuacuucagccugaccuucugcgugcagguucagggcaagagcaagagagagaagaaggacagaguguucaccgacaagaccagcgccaccgugaucugcagaaagaacgccagcaucagcgugagagcccaggacagauacuacagcagcagcuggagcgagugggccagcgugcccugcagcuga

SEQ ID NO: 75 - RNA, 54 nt, Artificial Sequence
  Linker-sFvCC49-218 CDS mRNA opt4
ggcagcaccagcggcagcggcaagcccggcagcggcgagggcagcaccaagggc

SEQ ID NO: 76 - RNA, 1632 nt, Artificial Sequence
  IL12 CDS mRNA opt4
augugccaccagcagcuggugaucagcugguucagccugguguuccuggccagcccccugguggccaucugggagcugaagaaggacguguacgugguggagcuggacugguaccccgacgcccccggcgagaugguggugcugaccugcgacacccccgaggaggacggcaucaccuggacccuggaccagagcagcgaggugcugggcagcggcaagacccugaccauccaggugaaggaguucggcgacgccggccaguacaccugucacaagggcggcgaggugcugagccacagccugcugcugcugcacaagaaggaggacggcaucuggagcaccgacauccugaaggaccagaaggagcccaagaacaagaccuuccugagaugcgaggccaagaacuacagcggcagauucaccuguugguggcugaccaccaucagcaccgaccugaccuucagcgugaagaguagcagaggcagcagcgacccccagggcgugaccugcggcgccgccacccugagcgccgagagagugagaggcgacaacaaggaguacgaguacagcguggagugccaggaggacagcgccugccccgccgccgaggagagccugcccaucgaggugaugguggacgccgugcacaagcugaaguacgagaacuacaccagcagcuucuucaucagagacaucaucaagcccgacccccccaagaaccugcagcugaagccccugaagaacagcagacagguggaggugagcugggaguaccccgacaccuggagcaccccccacagcuacuucagccugaccuucugcgugcagguucagggcaagagcaagagagagaagaaggacagaguguucaccgacaagaccagcgccaccgugaucugcagaaagaacgccagcaucagcgugagagcccaggacagauacuacagcagcagcuggagcgagugggccagcgugcccugcagcggcagcaccagcggcagcggcaagcccggcagcggcgagggcagcaccaagggcagaaaccugcccguggccacccccgaccccggcauguuccccugccugcaccacagccagaaccugcugagagccgugagcaacaugcugcagaaggccagacagacccuggaguucuaccccugcaccagcgaggagaucgaccacgaggacaucaccaaggacaagaccagcaccguggaggccugccugccccuggagcugaccaagaacgagagcugccugaacagcagagagaccagcuucaucaccaacggcagcugccuggccagcagaaagaccagcuucaugauggcccugugccugagcagcaucuacgaggaccugaagauguaccagguggaguucaagaccaugaacgccaagcugcugauggaccccaagagacagaucuuccuggaccagaacaugcuggccgugaucgacgagcugaugcaggcccugaacuucaacagcgagaccgugccccagaagaguagccuggaggagcccgacuucuacaagaccaagaucaagcugugcauccugcugcacgccuucagaaucagagccgugaccaucgacagagugaugagcuaccugaacgccagcuga

SEQ ID NO: 77 - RNA, 786 nt, Artificial Sequence
  CD40LG CDS mRNA opt4
augaucgagaccuacaaccagaccagccccagaagcgccgccaccggccugcccaucagcaugaagaucuucauguaccugcugaccguguuccugaucacccagaugaucggcagcgcccuguucgccguguaccugcacagaagacuggacaagaucgaggacgagagaaaccugcacgaggacuucguguucaugaagaccauccagagaugcaacaccggcgagagaagccugagccugcugaacugcgaggagaucaagagccaguucgagggcuucgugaaggacaucaugcugaacaaggaggagaccaagaaggagaacagcuucgagaugcagaagggcgaccagaacccccagaucgccgcccacgugaucagcgaggccagcagcaagaccaccagcgugcugcagugggccgagaagggcuacuacaccaugagcaacaaccuggugacccuggagaacggcaagcagcugaccgugaagagacagggccuguacuacaucuacgcccaggugaccuucugcagcaacagagaggccagcagccaggcccccuucaucgccagccugugccugaagagucccggcagauucgagagaauccugcugagagccgccaacacccacagcagcgccaagcccugcggccagcagagcauccaccugggcggcguguucgagcugcagcccggcgccagcguguucgugaacgugaccgaccccagccaggugagccacggcaccggcuucaccagcuucggccugcugaagcuguga

SEQ ID NO: 78 - RNA, 867 nt, Artificial Sequence
  PDCD1 CDS mRNA opt5
augcagaucccccaagccccuuggccgguggucugggcuguucugcagcucggcuggagacccgggugguuccuggacagcccugaucggcccuggaacccucccaccuuuuccccugcccuucugguggugacagagggagacaaugcgacguuuaccugcucuuucagcaacacauccgaaucuuucguccucaauugguaccgcaugagcccguccaaccagaccgauaagcuggcugccuuucccgaggacagaucucagccuggccaagauugucgguuccgcgugacacagcuucccaaugggagagacuuucacaugagcguugugcgggcccgcagaaacgauuccggaaccuaucugugcggcgcuauuagccucgccccuaaagcucagaucaaggaaucucugcgggccgagcugcgcgucacagaaagacgggcggaggugcccaccgcccauccguccccuagcccccgcccugcugggcaguuccaaacgcucguugugggagucgugggcggccugcuugggucucuggugcuccuggucuggguucuugccgugauuuguuccagagcugcccggggaaccaucggcgcgcgcagaacagggcagccccugaaagaggaccccagcgccgugccugucuuuucuguggauuacggagaacucgacuuccaguggcgggagaagaccccggaacccccuguucccugcgugccugagcagacagaguaugcuaccauugucuuucccuccggcauggggacgagcuccccggccagacgcggaucugcugauggcccucggagcgcccaaccccugagaccugaagacggccacuguuccuggccccuguga

SEQ ID NO: 79 - RNA, 450 nt, Artificial Sequence
  PDCD1(1-149) CDS mRNA opt5
augcagaucccccaagccccuuggccgguggucugggcuguucugcagcucggcuggagacccgggugguuccuggacagcccugaucggcccuggaacccucccaccuuuuccccugcccuucugguggugacagagggagacaaugcgacguuuaccugcucuuucagcaacacauccgaaucuuucguccucaauugguaccgcaugagcccguccaaccagaccgauaagcuggcugccuuucccgaggacagaucucagccuggccaagauugucgguuccgcgugacacagcuucccaaugggagagacuuucacaugagcguugugcgggcccgcagaaacgauuccggaaccuaucugugcggcgcuauuagccucgccccuaaagcucagaucaaggaaucucugcgggccgagcugcgcgucacagaaagacgggcguga

SEQ ID NO: 80 - RNA, 660 nt, Artificial Sequence
  IL12A CDS mRNA opt5
augugccccgccagaagccugcuccugguggcuacccuuguccugcucgaccaccugucccuugcccggaaccugccuguugcgacaccggaucccggcauguucccuugucuccaucacucucagaaucugcugcgcgcugugagcaacaugcuccaaaaggccagacagacgcuggaguuuuaccccugcaccuccgaagagaucgaccaugaagauauuacaaaagacaagaccucuacaguggaggccugucuuccucuggaacucaccaaaaaugagagcugccugaacucccgggagacaucuuucaucaccaaugggagcugucuugcuucccgcaagacgagcuuuaugauggcccugugccucucuuccauuuaugaagaucugaaaauguaccaggucgaguucaagaccaugaacgcuaagcugcucauggaccccaaaagacagaucuuucuggaucaaaauaugcuugccgugauugacgaacugaugcaggcgcucaacuucaauagcgagacaguuccucagaagucuucccuggaggaaccggauuuuuauaaaaccaagaucaaacuuuguauccugcuccacgccuuccggauucgcgcugugacaaucgacagagucaugagcuaccugaacgccucuuga

SEQ ID NO: 81 - RNA, 657 nt, Artificial Sequence
  IL12A(1-219) CDS mRNA opt5
augugccccgccagaagccugcuccugguggcuacccuuguccugcucgaccaccugucccuugcccggaaccugccuguugcgacaccggaucccggcauguucccuugucuccaucacucucagaaucugcugcgcgcugugagcaacaugcuccaaaaggccagacagacgcuggaguuuuaccccugcaccuccgaagagaucgaccaugaagauauuacaaaagacaagaccucuacaguggaggccugucuuccucuggaacucaccaaaaaugagagcugccugaacucccgggagacaucuuucaucaccaaugggagcugucuugcuucccgcaagacgagcuuuaugauggcccugugccucucuuccauuuaugaagaucugaaaauguaccaggucgaguucaagaccaugaacgcuaagcugcucauggaccccaaaagacagaucuuucuggaucaaaauaugcuugccgugauugacgaacugaugcaggcgcucaacuucaauagcgagacaguuccucagaagucuucccuggaggaaccggauuuuuauaaaaccaagaucaaacuuuguauccugcuccacgccuuccggauucgcgcugugacaaucgacagagucaugagcuaccugaacgccucu

SEQ ID NO: 82 - RNA, 594 nt, Artificial Sequence
  IL12A(23-219) CDS mRNA opt5
cggaaccugccuguugcgacaccggaucccggcauguucccuugucuccaucacucucagaaucugcugcgcgcugugagcaacaugcuccaaaaggccagacagacgcuggaguuuuaccccugcaccuccgaagagaucgaccaugaagauauuacaaaagacaagaccucuacaguggaggccugucuuccucuggaacucaccaaaaaugagagcugccugaacucccgggagacaucuuucaucaccaaugggagcugucuugcuucccgcaagacgagcuuuaugauggcccugugccucucuuccauuuaugaagaucugaaaauguaccaggucgaguucaagaccaugaacgcuaagcugcucauggaccccaaaagacagaucuuucuggaucaaaauaugcuugccgugauugacgaacugaugcaggcgcucaacuucaauagcgagacaguuccucagaagucuucccuggaggaaccggauuuuuauaaaaccaagaucaaacuuuguauccugcuccacgccuuccggauucgcgcugugacaaucgacagagucaugagcuaccugaacgccucuuga

SEQ ID NO: 83 - RNA, 987 nt, Artificial Sequence
  IL12B CDS mRNA opt5
augugccaccagcaacuggugaucagcugguucucccucgucuuucuggccucuccccuuguugcuauuugggagcugaagaaagacguguacguggucgaacucgauugguauccugacgccccgggcgagauggugguucugaccugugauacacccgaagaggacgggaucacguggacccuugaucagagcuccgaagugcugggaucuggcaagacacucaccauucaggucaaagaguucggggacgcgggacaguacacaugccauaagggcggggaggugcugagccacucccugcuccugcuucauaaaaaggaagauggaaucuggucuaccgacauucugaaggaucaaaaagagccuaagaacaaaacauuucucagaugugaagcuaagaauuauagcggccgguuuaccugcugguggcugacgaccaucuccacagaccuuaccuucagcguuaaaucuucccgcggcagcucugauccccagggggugacauguggagccgccacccuguccgcugagagaguccggggcgacaacaaggaguacgaauauagcguggagugccaggaagauucugccuguccugcugccgaggaaucccuccccaucgaggugauggucgacgcgguucacaagcugaaauacgagaauuauacgagcuccuucuuuauucgcgacaucauuaagccugauccgcccaaaaaccugcagcucaagccucugaaaaauucuagacaaguggaagugagcugggaguaccccgacacaugguccaccccucauagcuacuucucucuuacauuuugcguccaggugcaggggaaguccaaacgggaaaagaaggaucgcguuuucaccgacaaaaccagcgccacagugaucuguagaaagaacgcuucuauuagcguccgggcccaggaucgcuauuacuccucuagcugguccgagugggcuagcgugcccugcucuuga

SEQ ID NO: 84 - RNA, 984 nt, Artificial Sequence
  IL12B(1-328) CDS mRNA opt5
augugccaccagcaacuggugaucagcugguucucccucgucuuucuggccucuccccuuguugcuauuugggagcugaagaaagacguguacguggucgaacucgauugguauccugacgccccgggcgagauggugguucugaccugugauacacccgaagaggacgggaucacguggacccuugaucagagcuccgaagugcugggaucuggcaagacacucaccauucaggucaaagaguucggggacgcgggacaguacacaugccauaagggcggggaggugcugagccacucccugcuccugcuucauaaaaaggaagauggaaucuggucuaccgacauucugaaggaucaaaaagagccuaagaacaaaacauuucucagaugugaagcuaagaauuauagcggccgguuuaccugcugguggcugacgaccaucuccacagaccuuaccuucagcguuaaaucuucccgcggcagcucugauccccagggggugacauguggagccgccacccuguccgcugagagaguccggggcgacaacaaggaguacgaauauagcguggagugccaggaagauucugccuguccugcugccgaggaaucccuccccaucgaggugauggucgacgcgguucacaagcugaaauacgagaauuauacgagcuccuucuuuauucgcgacaucauuaagccugauccgcccaaaaaccugcagcucaagccucugaaaaauucuagacaaguggaagugagcugggaguaccccgacacaugguccaccccucauagcuacuucucucuuacauuuugcguccaggugcaggggaaguccaaacgggaaaagaaggaucgcguuuucaccgacaaaaccagcgccacagugaucuguagaaagaacgcuucuauuagcguccgggcccaggaucgcuauuacuccucuagcugguccgagugggcuagcgugcccugcucu

SEQ ID NO: 85 - RNA, 921 nt, Artificial Sequence
  IL12B(23-328) CDS mRNA opt5
auuugggagcugaagaaagacguguacguggucgaacucgauugguauccugacgccccgggcgagauggugguucugaccugugauacacccgaagaggacgggaucacguggacccuugaucagagcuccgaagugcugggaucuggcaagacacucaccauucaggucaaagaguucggggacgcgggacaguacacaugccauaagggcggggaggugcugagccacucccugcuccugcuucauaaaaaggaagauggaaucuggucuaccgacauucugaaggaucaaaaagagccuaagaacaaaacauuucucagaugugaagcuaagaauuauagcggccgguuuaccugcugguggcugacgaccaucuccacagaccuuaccuucagcguuaaaucuucccgcggcagcucugauccccagggggugacauguggagccgccacccuguccgcugagagaguccggggcgacaacaaggaguacgaauauagcguggagugccaggaagauucugccuguccugcugccgaggaaucccuccccaucgaggugauggucgacgcgguucacaagcugaaauacgagaauuauacgagcuccuucuuuauucgcgacaucauuaagccugauccgcccaaaaaccugcagcucaagccucugaaaaauucuagacaaguggaagugagcugggaguaccccgacacaugguccaccccucauagcuacuucucucuuacauuuugcguccaggugcaggggaaguccaaacgggaaaagaaggaucgcguuuucaccgacaaaaccagcgccacagugaucuguagaaagaacgcuucuauuagcguccgggcccaggaucgcuauuacuccucuagcugguccgagugggcuagcgugcccugcucuuga

SEQ ID NO: 86 - RNA, 54 nt, Artificial Sequence
  Linker-sFvCC49-218 CDS mRNA opt5
ggcagcaccuccgggucuggaaagcccggcagcggggagggauccacaaaaggc

SEQ ID NO: 87 - RNA, 1632 nt, Artificial Sequence
  IL12 CDS mRNA opt5
augugccaccagcaacuggugaucagcugguucucccucgucuuucuggccucuccccuuguugcuauuugggagcugaagaaagacguguacguggucgaacucgauugguauccugacgccccgggcgagauggugguucugaccugugauacacccgaagaggacgggaucacguggacccuugaucagagcuccgaagugcugggaucuggcaagacacucaccauucaggucaaagaguucggggacgcgggacaguacacaugccauaagggcggggaggugcugagccacucccugcuccugcuucauaaaaaggaagauggaaucuggucuaccgacauucugaaggaucaaaaagagccuaagaacaaaacauuucucagaugugaagcuaagaauuauagcggccgguuuaccugcugguggcugacgaccaucuccacagaccuuaccuucagcguuaaaucuucccgcggcagcucugauccccagggggugacauguggagccgccacccuguccgcugagagaguccggggcgacaacaaggaguacgaauauagcguggagugccaggaagauucugccuguccugcugccgaggaaucccuccccaucgaggugauggucgacgcgguucacaagcugaaauacgagaauuauacgagcuccuucuuuauucgcgacaucauuaagccugauccgcccaaaaaccugcagcucaagccucugaaaaauucuagacaaguggaagugagcugggaguaccccgacacaugguccaccccucauagcuacuucucucuuacauuuugcguccaggugcaggggaaguccaaacgggaaaagaaggaucgcguuuucaccgacaaaaccagcgccacagugaucuguagaaagaacgcuucuauuagcguccgggcccaggaucgcuauuacuccucuagcugguccgagugggcuagcgugcccugcucuggcagcaccuccgggucuggaaagcccggcagcggggagggauccacaaaaggccggaaccugccuguugcgacaccggaucccggcauguucccuugucuccaucacucucagaaucugcugcgcgcugugagcaacaugcuccaaaaggccagacagacgcuggaguuuuaccccugcaccuccgaagagaucgaccaugaagauauuacaaaagacaagaccucuacaguggaggccugucuuccucuggaacucaccaaaaaugagagcugccugaacucccgggagacaucuuucaucaccaaugggagcugucuugcuucccgcaagacgagcuuuaugauggcccugugccucucuuccauuuaugaagaucugaaaauguaccaggucgaguucaagaccaugaacgcuaagcugcucauggaccccaaaagacagaucuuucuggaucaaaauaugcuugccgugauugacgaacugaugcaggcgcucaacuucaauagcgagacaguuccucagaagucuucccuggaggaaccggauuuuuauaaaaccaagaucaaacuuuguauccugcuccacgccuuccggauucgcgcugugacaaucgacagagucaugagcuaccugaacgccucuuga

SEQ ID NO: 88 - RNA, 786 nt, Artificial Sequence
  CD40LG CDS mRNA opt5
augaucgagaccuacaaccagacaagccccagauccgccgcuacgggccugccuauuucuaugaagaucuucauguaucuccugaccguguuucuuauuacacaaaugaucgggagcgcccuguucgcggucuaccuccaccggcgccuggacaaaauugaagaugagagaaaucuucaugaagacuuuguuuucaugaagaccauccagcggugcaacacaggagagcgcucccugucucuccugaauugugaagagaucaaaagccaguuugagggcuucgugaaggauauuaugcugaacaaagaagagaccaagaaggaaaauuccuuugagaugcagaaaggggaccaaaacccgcagaucgcugcccacgugauuucugaggccagcuccaagacaaccagcguccuccagugggcugaaaaaggauauuacacgaugucuaauaaccuggugacccuugagaauggcaagcagcugacaguuaaaagacaagggcucuauuacaucuaugcccaggugaccuucugcuccaaccgggaagcuagcucucaggcccccuuuauugcgucccugugucuuaagagcccuggacgcuucgagagaauccugcuccgggccgcuaauacacauucuuccgccaagcccugcggccagcaaagcauucaccugggcggggucuuugaacugcagccuggagcuuccguguucguuaacgugaccgaucccucucaggucagccauggcacgggguuuacauccuucggacuccugaaacuuuga

SEQ ID NO: 89 - RNA, 867 nt, Artificial Sequence
  PDCD1 CDS mRNA opt6
augcaaauaccacaagcaccauggccaguaguaugggcuguacuacaauuagguuggcgaccaggaugguuuuuagacucaccagaucguccauggaacccaccaacauuuucaccagcauuauuaguaguaacagaaggagauaaugcaaccuuuacauguucauucaguaacacaucagaaaguuuuguacuaaauugguauagaaugucaccuucaaaucaaacagauaaauuagcagcauuuccagaagauagaucacaaccaggacaagauugcagauuuagaguaacacaauuaccuaauggacgagacuuucauaugucaguaguaagagcucgacguaacgauucaggaacauacuuauguggagcaauaucauuagcaccaaaagcacaaauaaaagaaucuuuaagagcagaauuaagaguaacagaaagacgcgcagaaguaccaacagcacauccaagcccuucaccacgaccugcaggacaauuucaaacauuaguagucggaguaguaggaggauuauuagguucacugguauuauuaguauggguauuagcaguaauaugcuccagagcagcaagaggaacaauaggagcaagaagaacaggacaaccauuaaaagaagacccaucugcaguaccaguauuuucaguugacuauggagaacuagauuuccaauggagggaaaaaacaccagaaccuccaguuccauguguaccagaacaaacagaauaugcaacaauuguauuucccucaggaaugggaacaucuaguccagcaagaagaggaucagcugauggaccaagaucagcacaaccauuaagaccagaagauggacauuguucauggccauuauaa

SEQ ID NO: 90 - RNA, 450 nt, Artificial Sequence
  PDCD1(1-149) CDS mRNA opt6
augcaaauaccacaagcaccauggccaguaguaugggcuguacuacaauuagguuggcgaccaggaugguuuuuagacucaccagaucguccauggaacccaccaacauuuucaccagcauuauuaguaguaacagaaggagauaaugcaaccuuuacauguucauucaguaacacaucagaaaguuuuguacuaaauugguauagaaugucaccuucaaaucaaacagauaaauuagcagcauuuccagaagauagaucacaaccaggacaagauugcagauuuagaguaacacaauuaccuaauggacgagacuuucauaugucaguaguaagagcucgacguaacgauucaggaacauacuuauguggagcaauaucauuagcaccaaaagcacaaauaaaagaaucuuuaagagcagaauuaagaguaacagaaagacgcgcauaa

SEQ ID NO: 91 - RNA, 660 nt, Artificial Sequence
  IL12A CDS mRNA opt6
augugcccagcaagaucacuacuacugguagcaacacugguacuacuagaccaccuaucacucgccagaaaccucccaguagccacaccagacccaggaauguuccccugccuccaccauucccaaaaccuacuaagagcaguaucaaacaugcuacaaaaagcaagacaaacacuagaguucuauccaugcacaucagaagaaauagaccacgaagacauaacaaaagacaaaacaucaaccguagaagcaugccucccacucgaacucacaaaaaacgaaucaugccuaaacucaagagaaacaucauucauaacaaacggcucaugcuuagccucaagaaaaacaucauucaugauggcacuaugccucucauccauauaugaagacuuaaaaauguaccaaguagaauuuaaaaccaugaacgcaaaauuacuaauggacccaaaaagacaaauauuccuagaccaaaacaugcuagcaguaauagacgaacuaaugcaagcacuaaacuucaacucagaaaccguaccccaaaaaucaucucuagaagaaccagacuucuacaaaacaaaaauaaaacuaugcauacuacuacacgccuucagaauaagagccgucacaauagacagagucaugucauaccuaaacgccucauaa

SEQ ID NO: 92 - RNA, 657 nt, Artificial Sequence
  IL12A(1-219) CDS mRNA opt6
augugcccagcaagaucacuacuacugguagcaacacugguacuacuagaccaccuaucacucgccagaaaccucccaguagccacaccagacccaggaauguuccccugccuccaccauucccaaaaccuacuaagagcaguaucaaacaugcuacaaaaagcaagacaaacacuagaguucuauccaugcacaucagaagaaauagaccacgaagacauaacaaaagacaaaacaucaaccguagaagcaugccucccacucgaacucacaaaaaacgaaucaugccuaaacucaagagaaacaucauucauaacaaacggcucaugcuuagccucaagaaaaacaucauucaugauggcacuaugccucucauccauauaugaagacuuaaaaauguaccaaguagaauuuaaaaccaugaacgcaaaauuacuaauggacccaaaaagacaaauauuccuagaccaaaacaugcuagcaguaauagacgaacuaaugcaagcacuaaacuucaacucagaaaccguaccccaaaaaucaucucuagaagaaccagacuucuacaaaacaaaaauaaaacuaugcauacuacuacacgccuucagaauaagagccgucacaauagacagagucaugucauaccuaaacgccuca

SEQ ID NO: 93 - RNA, 594 nt, Artificial Sequence
  IL12A(23-219) CDS mRNA opt6
agaaaccucccaguagccacaccagacccaggaauguuccccugccuccaccauucccaaaaccuacuaagagcaguaucaaacaugcuacaaaaagcaagacaaacacuagaguucuauccaugcacaucagaagaaauagaccacgaagacauaacaaaagacaaaacaucaaccguagaagcaugccucccacucgaacucacaaaaaacgaaucaugccuaaacucaagagaaacaucauucauaacaaacggcucaugcuuagccucaagaaaaacaucauucaugauggcacuaugccucucauccauauaugaagacuuaaaaauguaccaaguagaauuuaaaaccaugaacgcaaaauuacuaauggacccaaaaagacaaauauuccuagaccaaaacaugcuagcaguaauagacgaacuaaugcaagcacuaaacuucaacucagaaaccguaccccaaaaaucaucucuagaagaaccagacuucuacaaaacaaaaauaaaacuaugcauacuacuacacgccuucagaauaagagccgucacaauagacagagucaugucauaccuaaacgccucauaa

SEQ ID NO: 94 - RNA, 987 nt, Artificial Sequence
  IL12B CDS mRNA opt6
augugccaccaacaacugguaauaucaugguucucacugguauucuuggcaucaccccuaguagcaauaugggaacuaaaaaaagacguauacguaguagaacuagacugguacccagacgcaccaggagaaaugguaguauuaacaugcgacacaccagaagaagauggaauaacuuggacauuagaccaaucaagugaaguauuaggaucaggcaaaacacuaacuauacaaguaaaagaauuuggagacgcaggacaauacacgugccacaaaggaggcgaaguccuaucacauucacuacuauuauuacacaaaaaagaagacggaaucuggagcacagacauauuaaaagaccaaaaagaaccaaaaaacaaaacauuucuaagaugcgaagcuaaaaacuauucaggaagauucacaugcugguggcuaacaaccaucaguaccgacuuaacauucucaguaaaaucaucaagaggaucaucagacccacaaggaguaacauguggagcagcaacacuaagcgcagaaagaguacgaggagacaacaaagaauacgaauauucaguagaaugucaagaagacucagcaugcccugcagcagaagaaucauuaccaauagaaguaauggucgacgcuguacacaaacuaaaauaugaaaauuacacaagcaguuucuucauaagagacauaauaaaacccgacccaccaaaaaaccuacaacuaaaaccauuaaaaaauucaagacaaguagaaguaucaugggaauacccagauacauggagcacaccacacaguuacuucucauuaacauucugcguacaaguacaaggaaaaaguaaaagagaaaaaaaagacagaguauucacagauaagacuucagcaacaguaauaugcagaaaaaacgcaagcauaagcguacgagcacaagacagauauuacucaagcucauggucagaaugggcaucaguaccauguucauaa

SEQ ID NO: 95 - RNA, 984 nt, Artificial Sequence
  IL12B(1-328) CDS mRNA opt6
augugccaccaacaacugguaauaucaugguucucacugguauucuuggcaucaccccuaguagcaauaugggaacuaaaaaaagacguauacguaguagaacuagacugguacccagacgcaccaggagaaaugguaguauuaacaugcgacacaccagaagaagauggaauaacuuggacauuagaccaaucaagugaaguauuaggaucaggcaaaacacuaacuauacaaguaaaagaauuuggagacgcaggacaauacacgugccacaaaggaggcgaaguccuaucacauucacuacuauuauuacacaaaaaagaagacggaaucuggagcacagacauauuaaaagaccaaaaagaaccaaaaaacaaaacauuucuaagaugcgaagcuaaaaacuauucaggaagauucacaugcugguggcuaacaaccaucaguaccgacuuaacauucucaguaaaaucaucaagaggaucaucagacccacaaggaguaacauguggagcagcaacacuaagcgcagaaagaguacgaggagacaacaaagaauacgaauauucaguagaaugucaagaagacucagcaugcccugcagcagaagaaucauuaccaauagaaguaauggucgacgcuguacacaaacuaaaauaugaaaauuacacaagcaguuucuucauaagagacauaauaaaacccgacccaccaaaaaaccuacaacuaaaaccauuaaaaaauucaagacaaguagaaguaucaugggaauacccagauacauggagcacaccacacaguuacuucucauuaacauucugcguacaaguacaaggaaaaaguaaaagagaaaaaaaagacagaguauucacagauaagacuucagcaacaguaauaugcagaaaaaacgcaagcauaagcguacgagcacaagacagauauuacucaagcucauggucagaaugggcaucaguaccauguuca

SEQ ID NO: 96 - RNA, 921 nt, Artificial Sequence
  IL12B(23-328) CDS mRNA opt6
auaugggaacuaaaaaaagacguauacguaguagaacuagacugguacccagacgcaccaggagaaaugguaguauuaacaugcgacacaccagaagaagauggaauaacuuggacauuagaccaaucaagugaaguauuaggaucaggcaaaacacuaacuauacaaguaaaagaauuuggagacgcaggacaauacacgugccacaaaggaggcgaaguccuaucacauucacuacuauuauuacacaaaaaagaagacggaaucuggagcacagacauauuaaaagaccaaaaagaaccaaaaaacaaaacauuucuaagaugcgaagcuaaaaacuauucaggaagauucacaugcugguggcuaacaaccaucaguaccgacuuaacauucucaguaaaaucaucaagaggaucaucagacccacaaggaguaacauguggagcagcaacacuaagcgcagaaagaguacgaggagacaacaaagaauacgaauauucaguagaaugucaagaagacucagcaugcccugcagcagaagaaucauuaccaauagaaguaauggucgacgcuguacacaaacuaaaauaugaaaauuacacaagcaguuucuucauaagagacauaauaaaacccgacccaccaaaaaaccuacaacuaaaaccauuaaaaaauucaagacaaguagaaguaucaugggaauacccagauacauggagcacaccacacaguuacuucucauuaacauucugcguacaaguacaaggaaaaaguaaaagagaaaaaaaagacagaguauucacagauaagacuucagcaacaguaauaugcagaaaaaacgcaagcauaagcguacgagcacaagacagauauuacucaagcucauggucagaaugggcaucaguaccauguucauaa

SEQ ID NO: 97 - RNA, 54 nt, Artificial Sequence
  Linker-sFvCC49-218 CDS mRNA opt6
ggaaguacaaguggaaguggaaaaccaggaaguggagaaggaaguacaaaagga

SEQ ID NO: 98 - RNA, 1632 nt, Artificial Sequence
  IL12 CDS mRNA opt6
augugccaccaacaacugguaauaucaugguucucacugguauucuuggcaucaccccuaguagcaauaugggaacuaaaaaaagacguauacguaguagaacuagacugguacccagacgcaccaggagaaaugguaguauuaacaugcgacacaccagaagaagauggaauaacuuggacauuagaccaaucaagugaaguauuaggaucaggcaaaacacuaacuauacaaguaaaagaauuuggagacgcaggacaauacacgugccacaaaggaggcgaaguccuaucacauucacuacuauuauuacacaaaaaagaagacggaaucuggagcacagacauauuaaaagaccaaaaagaaccaaaaaacaaaacauuucuaagaugcgaagcuaaaaacuauucaggaagauucacaugcugguggcuaacaaccaucaguaccgacuuaacauucucaguaaaaucaucaagaggaucaucagacccacaaggaguaacauguggagcagcaacacuaagcgcagaaagaguacgaggagacaacaaagaauacgaauauucaguagaaugucaagaagacucagcaugcccugcagcagaagaaucauuaccaauagaaguaauggucgacgcuguacacaaacuaaaauaugaaaauuacacaagcaguuucuucauaagagacauaauaaaacccgacccaccaaaaaaccuacaacuaaaaccauuaaaaaauucaagacaaguagaaguaucaugggaauacccagauacauggagcacaccacacaguuacuucucauuaacauucugcguacaaguacaaggaaaaaguaaaagagaaaaaaaagacagaguauucacagauaagacuucagcaacaguaauaugcagaaaaaacgcaagcauaagcguacgagcacaagacagauauuacucaagcucauggucagaaugggcaucaguaccauguucaggaaguacaaguggaaguggaaaaccaggaaguggagaaggaaguacaaaaggaagaaaccucccaguagccacaccagacccaggaauguuccccugccuccaccauucccaaaaccuacuaagagcaguaucaaacaugcuacaaaaagcaagacaaacacuagaguucuauccaugcacaucagaagaaauagaccacgaagacauaacaaaagacaaaacaucaaccguagaagcaugccucccacucgaacucacaaaaaacgaaucaugccuaaacucaagagaaacaucauucauaacaaacggcucaugcuuagccucaagaaaaacaucauucaugauggcacuaugccucucauccauauaugaagacuuaaaaauguaccaaguagaauuuaaaaccaugaacgcaaaauuacuaauggacccaaaaagacaaauauuccuagaccaaaacaugcuagcaguaauagacgaacuaaugcaagcacuaaacuucaacucagaaaccguaccccaaaaaucaucucuagaagaaccagacuucuacaaaacaaaaauaaaacuaugcauacuacuacacgccuucagaauaagagccgucacaauagacagagucaugucauaccuaaacgccucauaa

SEQ ID NO: 99 - RNA, 786 nt, Artificial Sequence
  CD40LG CDS mRNA opt6
augauagaaacauauaaucaaacaagcccaagaucagcagcaacaggacuaccaauaucaaugaaaauauucauguaccuacucacagucuuccuaauaacacaaaugauaggaucugcccuauuugcaguauaccuacacagaagacuagauaaaauagaagacgaaagaaaccuacaugaagacuucguauucaugaaaacaauacaaagaugcaacaccggagaaagaucccuaucacuacuaaacugcgaagaaauaaaaucacaauucgaaggauucguaaaagacauaaugcuaaacaaagaagaaacaaaaaaagaaaacucuuucgaaaugcaaaaaggagaccaaaacccacaaauagcugcacacgucauaucagaagcaucaucaaaaacaacaucaguacuucaaugggcagaaaaaggauacuauacaaugucaaacaaucuaguaacccuagaaaacggaaaacaacuaacaguaaaaagacaaggacuauacuauauauacgcacaaguaacauucugcucaaacagagaagcaucaucacaagcaccauucaucgcaucacuaugccuaaaauccccaggaagauucgaacgaauccuacuaagagcagcaaacacacacucaucagcaaaaccaugcggccaacaaucaauacaccuaggaggaguauucgaacuacaaccaggagcaucaguauucguaaacguaacagaccccucacaaguaagccacggcacaggauucacaucauuuggacuauuaaaauuauaa

SEQ ID NO: 100 - RNA, 867 nt, Artificial Sequence
  PDCD1 CDS mRNA opt7
augcagaucccccaagccccauggccgguggucugggcagugcugcagcucggcuggaggcccgggugguuccuggacagcccagaucggcccuggaacccacccaccuuuuccccagccuugcugguagugacugagggugacaaugcgaccuucacgugcaguuuuagcaacacuuccgaaaguuucguccucaauugguaccgcaugagcccguccaaccagaccgauaagcuggccgcauuucccgaggacaggagccagccaggccaagauugucgguuccgcgugacccaguugcccaaugggagggacuuucacauguccgugguccgggcccgcaggaacgauaguggcacuuaucugugcggugcaauuagccucgccccaaaagcgcagaucaaggaaucccugcgggccgagcugcgcgugaccgaaaggcgggcagagguacccacggcccauccgagccccaguccacgccccgccgggcaguuccaaacucucguggucggcguggugggcgggcuguuggguucccugguccuccugguguggguacuggcagugauuuguagcagggccgcgcggggcaccaucggggcccgcaggacuggccagccauugaaagaggaccccuccgcagucccaguguuuaguguggauuacggugaacucgacuuccaguggcgggagaagaccccggaacccccaguccccugcgugccagagcagaccgaguaugccacgauuguauuucccagcgggaugggcacuuccagcccggcacgcaggggcagugccgaugggccacgguccgcccaaccccugaggcccgaagacggucacuguagcuggccacuguga

SEQ ID NO: 101 - RNA, 450 nt, Artificial Sequence
  PDCD1(1-149) CDS mRNA opt7
augcagaucccccaagccccauggccgguggucugggcagugcugcagcucggcuggaggcccgggugguuccuggacagcccagaucggcccuggaacccacccaccuuuuccccagccuugcugguagugacugagggugacaaugcgaccuucacgugcaguuuuagcaacacuuccgaaaguuucguccucaauugguaccgcaugagcccguccaaccagaccgauaagcuggccgcauuucccgaggacaggagccagccaggccaagauugucgguuccgcgugacccaguugcccaaugggagggacuuucacauguccgugguccgggcccgcaggaacgauaguggcacuuaucugugcggugcaauuagccucgccccaaaagcgcagaucaaggaaucccugcgggccgagcugcgcgugaccgaaaggcgggcauga

SEQ ID NO: 102 - RNA, 660 nt, Artificial Sequence
  IL12A CDS mRNA opt7
augugccccgccaggagccugcuccugguggcaaccuugguccugcucgaccaccuguccuuggcccggaaccugccaguggcgacuccggaucccggcauguucccaugucuccaucacagucagaaucugcugcgcgccguaagcaacaugcuccaaaaggcaaggcagacccuggaguuuuaccccugcacguccgaagagaucgaccaugaagauauuacuaaagacaagaccaguaccguggaggccuguuugccacuggaacucacuaaaaaugagagcugccugaacucccgggagaccagcuucaucacgaauggguccugucuggcaagucgcaagacuagcuuuaugauggccuugugccucuccagcauuuaugaagaucugaaaauguaccaggucgaguucaagaccaugaacgcgaagcugcucauggaccccaaaaggcagaucuuucuggaucaaaauauguuggccgugauugacgaacugaugcaggcacucaacuucaauagugagacugugccacagaaguccagccuggaggaaccggauuuuuauaaaaccaagaucaaacuguguaucuugcuccacgccuuccggauucgcgccgucaccaucgacagggugauguccuaccugaacgcaaguuga

SEQ ID NO: 103 - RNA, 657 nt, Artificial Sequence
  IL12A(1-219) CDS mRNA opt7
augugccccgccaggagccugcuccugguggcaaccuugguccugcucgaccaccuguccuuggcccggaaccugccaguggcgacuccggaucccggcauguucccaugucuccaucacagucagaaucugcugcgcgccguaagcaacaugcuccaaaaggcaaggcagacccuggaguuuuaccccugcacguccgaagagaucgaccaugaagauauuacuaaagacaagaccaguaccguggaggccuguuugccacuggaacucacuaaaaaugagagcugccugaacucccgggagaccagcuucaucacgaauggguccugucuggcaagucgcaagacuagcuuuaugauggccuugugccucuccagcauuuaugaagaucugaaaauguaccaggucgaguucaagaccaugaacgcgaagcugcucauggaccccaaaaggcagaucuuucuggaucaaaauauguuggccgugauugacgaacugaugcaggcacucaacuucaauagugagacugugccacagaaguccagccuggaggaaccggauuuuuauaaaaccaagaucaaacuguguaucuugcuccacgccuuccggauucgcgccgucaccaucgacagggugauguccuaccugaacgcaagu

SEQ ID NO: 104 - RNA, 594 nt, Artificial Sequence
  IL12A(23-219) CDS mRNA opt7
cggaaccugccaguggcgacuccggaucccggcauguucccaugucuccaucacagucagaaucugcugcgcgccguaagcaacaugcuccaaaaggcaaggcagacccuggaguuuuaccccugcacguccgaagagaucgaccaugaagauauuacuaaagacaagaccaguaccguggaggccuguuugccacuggaacucacuaaaaaugagagcugccugaacucccgggagaccagcuucaucacgaauggguccugucuggcaagucgcaagacuagcuuuaugauggccuugugccucuccagcauuuaugaagaucugaaaauguaccaggucgaguucaagaccaugaacgcgaagcugcucauggaccccaaaaggcagaucuuucuggaucaaaauauguuggccgugauugacgaacugaugcaggcacucaacuucaauagugagacugugccacagaaguccagccuggaggaaccggauuuuuauaaaaccaagaucaaacuguguaucuugcuccacgccuuccggauucgcgccgucaccaucgacagggugauguccuaccugaacgcaaguuga

SEQ ID NO: 105 - RNA, 987 nt, Artificial Sequence
  IL12B CDS mRNA opt7
augugccaccagcaacuggugaucagcugguucucccucgucuuucuggccagucccuugguggcaauuugggagcugaagaaagacguauacguggucgaacucgauugguauccagacgccccgggcgagaugguggugcugaccugugauacucccgaagaggacgggaucaccuggacguuggaucagagcuccgaaguccuggguaguggcaagacucucaccauucaggugaaagaguucggggacgcgggccaguauaccugccauaaggguggggagguacugagccacucccugcuccuguugcauaaaaaggaagauggcaucuggagcacugacauucugaaggaucaaaaagagccaaagaacaaaaccuuucucaggugugaagccaagaauuacuccggccgguucacgugcugguggcugacuaccaucaguacugaccugaccuuuagcgugaaauccagccgcgggaguuccgauccccagggugucaccuguggcgcagccacguugagcgcagagagggugcgcggggacaacaaggaguacgaauauuccguggagugccaggaagauagugccuguccagcggccgaggaaagccuccccaucgaggucaugguggacgcaguacacaaacugaaguacgagaauuauacuuccagcuucuuuauucgggacaucauuaagccagauccgcccaaaaaccugcagcucaagccacugaaaaauaguaggcaaguggaagucuccugggaguaccccgacaccuggagcacuccacauaguuacuucuccuugaccuuuugcguccaggugcagggcaagagcaaacgggaaaagaaggaucgcguguucaccgacaaaacuagcgccacggugaucuguaggaagaacgccuccauuaguguacgggcacaggaucgcuauuacagcuccagcuggagugagugggccuccgugcccugcagcuga

SEQ ID NO: 106 - RNA, 984 nt, Artificial Sequence
  IL12B(1-328) CDS mRNA opt7
augugccaccagcaacuggugaucagcugguucucccucgucuuucuggccagucccuugguggcaauuugggagcugaagaaagacguauacguggucgaacucgauugguauccagacgccccgggcgagaugguggugcugaccugugauacucccgaagaggacgggaucaccuggacguuggaucagagcuccgaaguccuggguaguggcaagacucucaccauucaggugaaagaguucggggacgcgggccaguauaccugccauaaggguggggagguacugagccacucccugcuccuguugcauaaaaaggaagauggcaucuggagcacugacauucugaaggaucaaaaagagccaaagaacaaaaccuuucucaggugugaagccaagaauuacuccggccgguucacgugcugguggcugacuaccaucaguacugaccugaccuuuagcgugaaauccagccgcgggaguuccgauccccagggugucaccuguggcgcagccacguugagcgcagagagggugcgcggggacaacaaggaguacgaauauuccguggagugccaggaagauagugccuguccagcggccgaggaaagccuccccaucgaggucaugguggacgcaguacacaaacugaaguacgagaauuauacuuccagcuucuuuauucgggacaucauuaagccagauccgcccaaaaaccugcagcucaagccacugaaaaauaguaggcaaguggaagucuccugggaguaccccgacaccuggagcacuccacauaguuacuucuccuugaccuuuugcguccaggugcagggcaagagcaaacgggaaaagaaggaucgcguguucaccgacaaaacuagcgccacggugaucuguaggaagaacgccuccauuaguguacgggcacaggaucgcuauuacagcuccagcuggagugagugggccuccgugcccugcagc

SEQ ID NO: 107 - RNA, 921 nt, Artificial Sequence
  IL12B(23-328) CDS mRNA opt7
auuugggagcugaagaaagacguauacguggucgaacucgauugguauccagacgccccgggcgagaugguggugcugaccugugauacucccgaagaggacgggaucaccuggacguuggaucagagcuccgaaguccuggguaguggcaagacucucaccauucaggugaaagaguucggggacgcgggccaguauaccugccauaaggguggggagguacugagccacucccugcuccuguugcauaaaaaggaagauggcaucuggagcacugacauucugaaggaucaaaaagagccaaagaacaaaaccuuucucaggugugaagccaagaauuacuccggccgguucacgugcugguggcugacuaccaucaguacugaccugaccuuuagcgugaaauccagccgcgggaguuccgauccccagggugucaccuguggcgcagccacguugagcgcagagagggugcgcggggacaacaaggaguacgaauauuccguggagugccaggaagauagugccuguccagcggccgaggaaagccuccccaucgaggucaugguggacgcaguacacaaacugaaguacgagaauuauacuuccagcuucuuuauucgggacaucauuaagccagauccgcccaaaaaccugcagcucaagccacugaaaaauaguaggcaaguggaagucuccugggaguaccccgacaccuggagcacuccacauaguuacuucuccuugaccuuuugcguccaggugcagggcaagagcaaacgggaaaagaaggaucgcguguucaccgacaaaacuagcgccacggugaucuguaggaagaacgccuccauuaguguacgggcacaggaucgcuauuacagcuccagcuggagugagugggccuccgugcccugcagcuga

SEQ ID NO: 108 - RNA, 54 nt, Artificial Sequence
  Linker-sFvCC49-218 CDS mRNA opt7
ggcagcaccuccgggagugguaagcccggcagcggggagggcuccacuaaaggu

SEQ ID NO: 109 - RNA, 1632 nt, Artificial Sequence
  IL12 CDS mRNA opt7
augugccaccagcaacuggugaucagcugguucucccucgucuuucuggccagucccuugguggcaauuugggagcugaagaaagacguauacguggucgaacucgauugguauccagacgccccgggcgagaugguggugcugaccugugauacucccgaagaggacgggaucaccuggacguuggaucagagcuccgaaguccuggguaguggcaagacucucaccauucaggugaaagaguucggggacgcgggccaguauaccugccauaaggguggggagguacugagccacucccugcuccuguugcauaaaaaggaagauggcaucuggagcacugacauucugaaggaucaaaaagagccaaagaacaaaaccuuucucaggugugaagccaagaauuacuccggccgguucacgugcugguggcugacuaccaucaguacugaccugaccuuuagcgugaaauccagccgcgggaguuccgauccccagggugucaccuguggcgcagccacguugagcgcagagagggugcgcggggacaacaaggaguacgaauauuccguggagugccaggaagauagugccuguccagcggccgaggaaagccuccccaucgaggucaugguggacgcaguacacaaacugaaguacgagaauuauacuuccagcuucuuuauucgggacaucauuaagccagauccgcccaaaaaccugcagcucaagccacugaaaaauaguaggcaaguggaagucuccugggaguaccccgacaccuggagcacuccacauaguuacuucuccuugaccuuuugcguccaggugcagggcaagagcaaacgggaaaagaaggaucgcguguucaccgacaaaacuagcgccacggugaucuguaggaagaacgccuccauuaguguacgggcacaggaucgcuauuacagcuccagcuggagugagugggccuccgugcccugcagcggcagcaccuccgggagugguaagcccggcagcggggagggcuccacuaaaggucggaaccugccaguggcgacuccggaucccggcauguucccaugucuccaucacagucagaaucugcugcgcgccguaagcaacaugcuccaaaaggcaaggcagacccuggaguuuuaccccugcacguccgaagagaucgaccaugaagauauuacuaaagacaagaccaguaccguggaggccuguuugccacuggaacucacuaaaaaugagagcugccugaacucccgggagaccagcuucaucacgaauggguccugucuggcaagucgcaagacuagcuuuaugauggccuugugccucuccagcauuuaugaagaucugaaaauguaccaggucgaguucaagaccaugaacgcgaagcugcucauggaccccaaaaggcagaucuuucuggaucaaaauauguuggccgugauugacgaacugaugcaggcacucaacuucaauagugagacugugccacagaaguccagccuggaggaaccggauuuuuauaaaaccaagaucaaacuguguaucuugcuccacgccuuccggauucgcgccgucaccaucgacagggugauguccuaccugaacgcaaguuga

SEQ ID NO: 110 - RNA, 786 nt, Artificial Sequence
  CD40LG CDS mRNA opt7
augaucgagaccuacaaccagacuagccccagguccgccgcaaccggccugccaauuaguaugaagaucuucauguaucuccugacgguguuuuugauuacucaaaugaucgggagcgcccuguucgcggucuaccuccaccggcgccuggacaaaauugaagaugagaggaauuugcaugaagacuuuguguucaugaagaccauccagcggugcaacaccggugagcgcucccugagucuccugaauugugaagagaucaaaagccaguuugagggcuucguaaaggauauuaugcugaacaaagaagagacuaagaaggaaaauuccuuugagaugcagaaaggggaccaaaacccgcagaucgccgcacacgugauuagcgaggccuccaguaagaccacgagcguccuccagugggcagaaaaaggcuauuacacuauguccaauaaccuggugaccuuggagaaugguaagcagcugacugugaaaaggcaagggcucuauuacaucuaugcccaggucaccuucugcagcaaccgggaagcgaguucccaggcccccuuuauugcaagccugugucugaaguccccaggccgcuucgagaggaucuugcuccgggccgccaauacccauaguagcgcaaaacccugcggccagcaauccauucaccucggggguguguuugaacugcagccaggcgccagcguauucgugaacgucacggaucccagucaggugucccaugggacuggcuucaccagcuuuggucugcugaaguuguga

SEQ ID NO: 111 - RNA, 867 nt, Artificial Sequence
  PDCD1 CDS mRNA opt8
augcaaaucccacaagcccccuggcccguagucugggccguacuacaacuaggcuggagacccggcugguuucucgacagccccgaccgacccuggaacccccccaccuucucacccgcccuccucgucgucaccgaaggcgacaacgccacauucacaugcuccuucuccaacaccucugaaucauucguccuaaacugguaccgaaugucacccuccaaccaaacugacaaacucgccgccuuucccgaagaccgcucccaacccggccaagacugccgauuccgagucacacaacuuccuaacggcagagacuuccacauguccguaguccgagcccgccgaaacgacuccggaaccuaccucugcggagccaucucccucgcccccaaagcccaaaucaaagaaucccuccgagcagaacuccgcgucaccgaacgccgcgccgaaguccccaccgcacacccaucacccuccccccgccccgccggccaauuccaaacacuuguaguaggcgucgucggcggccuccuuggaucacucguccuacuuguauggguccuagccgucaucugcucucgcgccgcacgcggcaccaucggcgcacgacgaaccggccaaccucuaaaagaagaccccuccgcaguccccgucuucuccgucgacuacggcgaacucgacuuccaauggcgcgaaaaaacccccgaacccccaguccccugcguacccgaacaaaccgaauacgcaacaaucguauuccccucaggaaugggcaccucaucccccgcccgacgaggaucagccgacggcccacgauccgcccaaccccuccgaccagaagacggccacugcucauggccccuuuaa

SEQ ID NO: 112 - RNA, 450 nt, Artificial Sequence
  PDCD1(1-149) CDS mRNA opt8
augcaaaucccacaagcccccuggcccguagucugggccguacuacaacuaggcuggagacccggcugguuucucgacagccccgaccgacccuggaacccccccaccuucucacccgcccuccucgucgucaccgaaggcgacaacgccacauucacaugcuccuucuccaacaccucugaaucauucguccuaaacugguaccgaaugucacccuccaaccaaacugacaaacucgccgccuuucccgaagaccgcucccaacccggccaagacugccgauuccgagucacacaacuuccuaacggcagagacuuccacauguccguaguccgagcccgccgaaacgacuccggaaccuaccucugcggagccaucucccucgcccccaaagcccaaaucaaagaaucccuccgagcagaacuccgcgucaccgaacgccgcgccuaa

SEQ ID NO: 113 - RNA, 660 nt, Artificial Sequence
  IL12A CDS mRNA opt8
augugccccgccagaucccuccuacucgucgcaacacuuguccuccucgaccaccucucccucgcccgcaaucuccccgucgccacccccgaccccggaauguuucccugccuccaccacucacaaaaccuccuacgcgccgucucaaacaugcuucaaaaagcccgacaaacccucgaauuuuaccccugcaccuccgaagaaaucgaccacgaagacauaaccaaagacaaaaccuccaccgucgaagccugccuaccauuagaacuaaccaaaaacgaauccugccucaacucacgcgaaaccuccuucaucacaaacggcucaugccucgccucacgcaaaaccuccuucaugauggcccucugccuaucaucaaucuaugaagaccucaaaauguaccaaguagaauuuaaaaccaugaacgccaaacuccucauggaccccaaacgccaaaucuuccucgaccaaaacaugcucgcagucaucgacgaacucaugcaagcccucaacuucaacucagaaacagucccacaaaaauccucccucgaagaacccgacuucuauaaaaccaaaaucaaacucugcauccuccuccacgccuuccgcauacgcgccguaaccaucgaccgcguaaugucauaccuaaaugccucuuaa

SEQ ID NO: 114 - RNA, 657 nt, Artificial Sequence
  IL12A(1-219) CDS mRNA opt8
augugccccgccagaucccuccuacucgucgcaacacuuguccuccucgaccaccucucccucgcccgcaaucuccccgucgccacccccgaccccggaauguuucccugccuccaccacucacaaaaccuccuacgcgccgucucaaacaugcuucaaaaagcccgacaaacccucgaauuuuaccccugcaccuccgaagaaaucgaccacgaagacauaaccaaagacaaaaccuccaccgucgaagccugccuaccauuagaacuaaccaaaaacgaauccugccucaacucacgcgaaaccuccuucaucacaaacggcucaugccucgccucacgcaaaaccuccuucaugauggcccucugccuaucaucaaucuaugaagaccucaaaauguaccaaguagaauuuaaaaccaugaacgccaaacuccucauggaccccaaacgccaaaucuuccucgaccaaaacaugcucgcagucaucgacgaacucaugcaagcccucaacuucaacucagaaacagucccacaaaaauccucccucgaagaacccgacuucuauaaaaccaaaaucaaacucugcauccuccuccacgccuuccgcauacgcgccguaaccaucgaccgcguaaugucauaccuaaaugccucu

SEQ ID NO: 115 - RNA, 594 nt, Artificial Sequence
  IL12A(23-219) CDS mRNA opt8
cgcaaucuccccgucgccacccccgaccccggaauguuucccugccuccaccacucacaaaaccuccuacgcgccgucucaaacaugcuucaaaaagcccgacaaacccucgaauuuuaccccugcaccuccgaagaaaucgaccacgaagacauaaccaaagacaaaaccuccaccgucgaagccugccuaccauuagaacuaaccaaaaacgaauccugccucaacucacgcgaaaccuccuucaucacaaacggcucaugccucgccucacgcaaaaccuccuucaugauggcccucugccuaucaucaaucuaugaagaccucaaaauguaccaaguagaauuuaaaaccaugaacgccaaacuccucauggaccccaaacgccaaaucuuccucgaccaaaacaugcucgcagucaucgacgaacucaugcaagcccucaacuucaacucagaaacagucccacaaaaauccucccucgaagaacccgacuucuauaaaaccaaaaucaaacucugcauccuccuccacgccuuccgcauacgcgccguaaccaucgaccgcguaaugucauaccuaaaugccucuuaa

SEQ ID NO: 116 - RNA, 987 nt, Artificial Sequence
  IL12B CDS mRNA opt8
augugccaccaacaacucgucauaagcugguucagccuaguauuccucgccucaccccucgucgccaucugggaacucaagaaagacguauacgucgucgaacuagacugguaccccgacgcacccggagaaaugguaguacucacaugcgacacccccgaagaagacggcaucacauggaccuuagaccaaucaucagaaguccucggauccggaaaaacccucacaauccaagucaaagaguucggcgacgccggccaauacacaugccacaaaggcggagaaguccucucacacucacuccuucuacuacacaagaaagaagacggcaucugguccaccgacauacucaaagaccaaaaagaacccaaaaacaaaaccuuccuccgcugcgaagccaaaaacuacuccggccgauucacaugcugguggcucaccaccaucuccaccgaccugaccuucuccgucaaauccagcaggggcuccucagacccacaaggcguaaccugcggcgcagccacccuaucggccgaacgaguccgcggagacaacaaagaauacgaauacagcgucgaaugccaagaagacucagcaugcccagcagccgaagaaucacuccccaucgaagucauggucgacgccguccacaaacuaaaauacgaaaacuacacaagcucauucuucauccgcgacauaaucaaacccgacccaccgaaaaaccuccaacucaaaccccuuaaaaacagccgccaagucgaagucuccugggaauaccccgacaccugguccacaccccacuccuacuucucacucaccuucugcguccaaguccaaggcaaauccaaacgcgaaaagaaagaccgcguauucaccgacaaaaccuccgccacagucaucugccgcaaaaacgccucaaucuccguccgcgcccaagaccgauacuacagcuccuccuggucagaaugggccuccgucccaugcuccuaa

SEQ ID NO: 117 - RNA, 984 nt, Artificial Sequence
  IL12B(1-328) CDS mRNA opt8
augugccaccaacaacucgucauaagcugguucagccuaguauuccucgccucaccccucgucgccaucugggaacucaagaaagacguauacgucgucgaacuagacugguaccccgacgcacccggagaaaugguaguacucacaugcgacacccccgaagaagacggcaucacauggaccuuagaccaaucaucagaaguccucggauccggaaaaacccucacaauccaagucaaagaguucggcgacgccggccaauacacaugccacaaaggcggagaaguccucucacacucacuccuucuacuacacaagaaagaagacggcaucugguccaccgacauacucaaagaccaaaaagaacccaaaaacaaaaccuuccuccgcugcgaagccaaaaacuacuccggccgauucacaugcugguggcucaccaccaucuccaccgaccugaccuucuccgucaaauccagcaggggcuccucagacccacaaggcguaaccugcggcgcagccacccuaucggccgaacgaguccgcggagacaacaaagaauacgaauacagcgucgaaugccaagaagacucagcaugcccagcagccgaagaaucacuccccaucgaagucauggucgacgccguccacaaacuaaaauacgaaaacuacacaagcucauucuucauccgcgacauaaucaaacccgacccaccgaaaaaccuccaacucaaaccccuuaaaaacagccgccaagucgaagucuccugggaauaccccgacaccugguccacaccccacuccuacuucucacucaccuucugcguccaaguccaaggcaaauccaaacgcgaaaagaaagaccgcguauucaccgacaaaaccuccgccacagucaucugccgcaaaaacgccucaaucuccguccgcgcccaagaccgauacuacagcuccuccuggucagaaugggccuccgucccaugcucc

SEQ ID NO: 118 - RNA, 921 nt, Artificial Sequence
  IL12B(23-328) CDS mRNA opt8
aucugggaacucaagaaagacguauacgucgucgaacuagacugguaccccgacgcacccggagaaaugguaguacucacaugcgacacccccgaagaagacggcaucacauggaccuuagaccaaucaucagaaguccucggauccggaaaaacccucacaauccaagucaaagaguucggcgacgccggccaauacacaugccacaaaggcggagaaguccucucacacucacuccuucuacuacacaagaaagaagacggcaucugguccaccgacauacucaaagaccaaaaagaacccaaaaacaaaaccuuccuccgcugcgaagccaaaaacuacuccggccgauucacaugcugguggcucaccaccaucuccaccgaccugaccuucuccgucaaauccagcaggggcuccucagacccacaaggcguaaccugcggcgcagccacccuaucggccgaacgaguccgcggagacaacaaagaauacgaauacagcgucgaaugccaagaagacucagcaugcccagcagccgaagaaucacuccccaucgaagucauggucgacgccguccacaaacuaaaauacgaaaacuacacaagcucauucuucauccgcgacauaaucaaacccgacccaccgaaaaaccuccaacucaaaccccuuaaaaacagccgccaagucgaagucuccugggaauaccccgacaccugguccacaccccacuccuacuucucacucaccuucugcguccaaguccaaggcaaauccaaacgcgaaaagaaagaccgcguauucaccgacaaaaccuccgccacagucaucugccgcaaaaacgccucaaucuccguccgcgcccaagaccgauacuacagcuccuccuggucagaaugggccuccgucccaugcuccuaa

SEQ ID NO: 119 - RNA, 54 nt, Artificial Sequence
  Linker-sFvCC49-218 CDS mRNA opt8
gggagcacgagcgggagcgggaagccgggaaguggagagggaaguacaaaggga

SEQ ID NO: 120 - RNA, 1632 nt, Artificial Sequence
  IL12 CDS mRNA opt8
augugccaccaacaacucgucauaagcugguucagccuaguauuccucgccucaccccucgucgccaucugggaacucaagaaagacguauacgucgucgaacuagacugguaccccgacgcacccggagaaaugguaguacucacaugcgacacccccgaagaagacggcaucacauggaccuuagaccaaucaucagaaguccucggauccggaaaaacccucacaauccaagucaaagaguucggcgacgccggccaauacacaugccacaaaggcggagaaguccucucacacucacuccuucuacuacacaagaaagaagacggcaucugguccaccgacauacucaaagaccaaaaagaacccaaaaacaaaaccuuccuccgcugcgaagccaaaaacuacuccggccgauucacaugcugguggcucaccaccaucuccaccgaccugaccuucuccgucaaauccagcaggggcuccucagacccacaaggcguaaccugcggcgcagccacccuaucggccgaacgaguccgcggagacaacaaagaauacgaauacagcgucgaaugccaagaagacucagcaugcccagcagccgaagaaucacuccccaucgaagucauggucgacgccguccacaaacuaaaauacgaaaacuacacaagcucauucuucauccgcgacauaaucaaacccgacccaccgaaaaaccuccaacucaaaccccuuaaaaacagccgccaagucgaagucuccugggaauaccccgacaccugguccacaccccacuccuacuucucacucaccuucugcguccaaguccaaggcaaauccaaacgcgaaaagaaagaccgcguauucaccgacaaaaccuccgccacagucaucugccgcaaaaacgccucaaucuccguccgcgcccaagaccgauacuacagcuccuccuggucagaaugggccuccgucccaugcuccgggagcacgagcgggagcgggaagccgggaaguggagagggaaguacaaagggacgcaaucuccccgucgccacccccgaccccggaauguuucccugccuccaccacucacaaaaccuccuacgcgccgucucaaacaugcuucaaaaagcccgacaaacccucgaauuuuaccccugcaccuccgaagaaaucgaccacgaagacauaaccaaagacaaaaccuccaccgucgaagccugccuaccauuagaacuaaccaaaaacgaauccugccucaacucacgcgaaaccuccuucaucacaaacggcucaugccucgccucacgcaaaaccuccuucaugauggcccucugccuaucaucaaucuaugaagaccucaaaauguaccaaguagaauuuaaaaccaugaacgccaaacuccucauggaccccaaacgccaaaucuuccucgaccaaaacaugcucgcagucaucgacgaacucaugcaagcccucaacuucaacucagaaacagucccacaaaaauccucccucgaagaacccgacuucuauaaaaccaaaaucaaacucugcauccuccuccacgccuuccgcauacgcgccguaaccaucgaccgcguaaugucauaccuaaaugccucuuaa

SEQ ID NO: 121 - RNA, 786 nt, Artificial Sequence
  CD40LG CDS mRNA opt8
augauagaaaccuacaaccaaaccucuccccgauccgcagccaccggccuccccaucuccaugaaaaucuucauguaccuccuaaccgucuuccuaaucacucaaaugaucggcuccgcucucuucgcagucuaccuccaccgccgccuagacaaaaucgaagacgaacgcaaccuacacgaagacuucgucuucaugaaaaccauucaacgcugcaacacaggcgaacgaucccuaucccuacucaacugcgaagaaaucaaaucccaauucgaaggcuuuguaaaagacaucaugcucaacaaagaagaaaccaaaaaagaaaacuccuucgaaaugcaaaaaggcgaccaaaacccccaaauagccgcccaugucauaucagaagccuccuccaaaaccaccuccguccuccaaugggccgaaaaaggcuacuacaccauguccaacaaccuaguaacccuugaaaacggcaaacaacucaccguaaaacgccaaggccucuacuacaucuacgcccaagucaccuucugcuccaacagagaagcauccucccaagcacccuucaucgccucccuaugccucaaaucccccggccgcuucgaacgaauccuccuccgcgccgccaacacucacuccucagccaaacccugcggccaacaaaguauacaccuuggcggagucuucgaacuccaacccggcgccuccgucuucguaaacgucaccgaccccucacaagucucccacggaaccggauucaccuccuucggccuacuaaaacuauag

SEQ ID NO: 122 - RNA, 867 nt, Artificial Sequence
  PDCD1 CDS mRNA opt9
augcaaaucccccaagccccauggcccgucgucugggccguccuccaacucggcuggcgccccggaugguuccuagacucuccagaccgccccuggaauccacccaccuucucccccgcccuccuagucgucaccgaaggcgacaacgccaccuucaccuguucauucuccaacaccucagaauccuucguacucaacugguaccgcauguccccaagcaaccaaacagacaaacucgccgccuuccccgaagaccgcucccaacccggucaagacugccgauuccgcgucacccaacuccccaacggacgcgacuuccacauguccgucguucgagcacgacgcaacgacucaggcacauaccuaugcggagccaucucccuagcccccaaagcccaaaucaaagaaucacuacgcgccgaacuccgcgucaccgaacgccgcgccgaaguacccacagcccacccauccccaucaccacgcccagcaggucaauuccaaaccuuagucgucggagucgucggcggccuccuaggcucacucguccuccuagucuggguccucgccgucauaugcagccgcgccgcacgcggcaccaucggcgccagacgcaccggacaaccccucaaagaagaccccucagccguccccgucuuuuccgucgacuacggcgaacuagacuuccaauggcgcgaaaaaacccccgaaccccccgucccaugcguacccgaacaaaccgaauacgccacaauagucuucccauccggcaugggaaccucaucacccgccagacgaggcucagcagauggcccccgcuccgcacaaccacuccgaccagaagacggccacugcagcuggccccuguaa

SEQ ID NO: 123 - RNA, 450 nt, Artificial Sequence
  PDCD1(1-149) CDS mRNA opt9
augcaaaucccccaagccccauggcccgucgucugggccguccuccaacucggcuggcgccccggaugguuccuagacucuccagaccgccccuggaauccacccaccuucucccccgcccuccuagucgucaccgaaggcgacaacgccaccuucaccuguucauucuccaacaccucagaauccuucguacucaacugguaccgcauguccccaagcaaccaaacagacaaacucgccgccuuccccgaagaccgcucccaacccggucaagacugccgauuccgcgucacccaacuccccaacggacgcgacuuccacauguccgucguucgagcacgacgcaacgacucaggcacauaccuaugcggagccaucucccuagcccccaaagcccaaaucaaagaaucacuacgcgccgaacuccgcgucaccgaacgccgcgccuaa

SEQ ID NO: 124 - RNA, 660 nt, Artificial Sequence
  IL12A CDS mRNA opt9
augugccccgccagaucccuccuccucgucgcaacccucguccuccucgaccaccucucccuagcacguaaccucccagucgccaccccagaccccggaauguuccccugccuccaucacucccaaaaucuccuccgugccgucuccaacaugcuccaaaaagcccgccaaacccucgaauuuuauccaugcaccuccgaagaaauagaccaugaagacaucaccaaagacaaaacauccaccgucgaagccugccucccccucgaacucacaaaaaacgaaucaugccucaacucccgcgaaaccuccuucauaaccaacggcucaugccucgccucucgcaaaaccucauucaugauggcccucugccuauccucuaucuacgaagaccucaaaauguaccaagucgaauuuaaaaccaugaacgccaaacuccucauggaccccaaacgccaaaucuuccucgaccaaaacaugcucgcagucaucgacgaacucaugcaagcacucaacuucaacucagaaaccgucccccaaaaauccucccucgaagaacccgacuucuacaaaacaaaaauaaaacucugcauccuccuccacgccuuccgcauccgagcagucaccaucgaucgcgucauguccuaccuaaacgccuccuaa

SEQ ID NO: 125 - RNA, 657 nt, Artificial Sequence
  IL12A(1-219) CDS mRNA opt9
augugccccgccagaucccuccuccucgucgcaacccucguccuccucgaccaccucucccuagcacguaaccucccagucgccaccccagaccccggaauguuccccugccuccaucacucccaaaaucuccuccgugccgucuccaacaugcuccaaaaagcccgccaaacccucgaauuuuauccaugcaccuccgaagaaauagaccaugaagacaucaccaaagacaaaacauccaccgucgaagccugccucccccucgaacucacaaaaaacgaaucaugccucaacucccgcgaaaccuccuucauaaccaacggcucaugccucgccucucgcaaaaccucauucaugauggcccucugccuauccucuaucuacgaagaccucaaaauguaccaagucgaauuuaaaaccaugaacgccaaacuccucauggaccccaaacgccaaaucuuccucgaccaaaacaugcucgcagucaucgacgaacucaugcaagcacucaacuucaacucagaaaccgucccccaaaaauccucccucgaagaacccgacuucuacaaaacaaaaauaaaacucugcauccuccuccacgccuuccgcauccgagcagucaccaucgaucgcgucauguccuaccuaaacgccucc

SEQ ID NO: 126 - RNA, 594 nt, Artificial Sequence
  IL12A(23-219) CDS mRNA opt9
cguaaccucccagucgccaccccagaccccggaauguuccccugccuccaucacucccaaaaucuccuccgugccgucuccaacaugcuccaaaaagcccgccaaacccucgaauuuuauccaugcaccuccgaagaaauagaccaugaagacaucaccaaagacaaaacauccaccgucgaagccugccucccccucgaacucacaaaaaacgaaucaugccucaacucccgcgaaaccuccuucauaaccaacggcucaugccucgccucucgcaaaaccucauucaugauggcccucugccuauccucuaucuacgaagaccucaaaauguaccaagucgaauuuaaaaccaugaacgccaaacuccucauggaccccaaacgccaaaucuuccucgaccaaaacaugcucgcagucaucgacgaacucaugcaagcacucaacuucaacucagaaaccgucccccaaaaauccucccucgaagaacccgacuucuacaaaacaaaaauaaaacucugcauccuccuccacgccuuccgcauccgagcagucaccaucgaucgcgucauguccuaccuaaacgccuccuaa

SEQ ID NO: 127 - RNA, 987 nt, Artificial Sequence
  IL12B CDS mRNA opt9
augugucaccaacaacuuguaaucagcugguucucccucgucuuccucgccucaccccucgucgccaucugggaacucaaaaaagacgucuacguagucgaacucgacugguaccccgacgccccaggagaaauggucguacucaccugugacacccccgaagaagacggcaucaccuggacccucgaccaauccuccgaaguccucgguucaggaaaaacccucaccauccaaguaaaagaauuuggcgacgccgggcaauauaccugccacaaaggcggcgagguccuaucccacucacuccuccuccuccacaagaaagaagacggaaucugguccaccgacauccuuaaagaccaaaaagaaccaaaaaacaaaacauuccuccgcugcgaagccaaaaacuacagcggccgcuucaccuguugguggcuaaccacaauaucaaccgacuuaaccuucagcgucaaauccuccagaggauccagcgacccacaaggaguuaccugcggagccgcaacacucagcgccgaacgaguccgcggagacaacaaagaauacgaauacuccgucgaaugccaagaagacucagcaugccccgccgcagaagaaucccuacccaucgaaguaaugguagacgccguccacaaacucaaauacgaaaacuacaccagcuccuucuucauccgagacaucaucaaacccgaccccccaaaaaaccuccaacuaaaaccccucaaaaacagccgccaaguagaaguauccugggaauaccccgacaccugguccacaccccacuccuacuucucgcucacguucugcguccaaguccaaggcaaauccaaacgagaaaaaaaagaccgcgucuucaccgacaaaacuuccgccaccgucaucugccgcaaaaacgccagcaucagcguccgcgcacaagaccgcuacuacucaagcuccugguccgaaugggccuccgucccaugcucauaa

SEQ ID NO: 128 - RNA, 984 nt, Artificial Sequence
  IL12B(1-328) CDS mRNA opt9
augugucaccaacaacuuguaaucagcugguucucccucgucuuccucgccucaccccucgucgccaucugggaacucaaaaaagacgucuacguagucgaacucgacugguaccccgacgccccaggagaaauggucguacucaccugugacacccccgaagaagacggcaucaccuggacccucgaccaauccuccgaaguccucgguucaggaaaaacccucaccauccaaguaaaagaauuuggcgacgccgggcaauauaccugccacaaaggcggcgagguccuaucccacucacuccuccuccuccacaagaaagaagacggaaucugguccaccgacauccuuaaagaccaaaaagaaccaaaaaacaaaacauuccuccgcugcgaagccaaaaacuacagcggccgcuucaccuguugguggcuaaccacaauaucaaccgacuuaaccuucagcgucaaauccuccagaggauccagcgacccacaaggaguuaccugcggagccgcaacacucagcgccgaacgaguccgcggagacaacaaagaauacgaauacuccgucgaaugccaagaagacucagcaugccccgccgcagaagaaucccuacccaucgaaguaaugguagacgccguccacaaacucaaauacgaaaacuacaccagcuccuucuucauccgagacaucaucaaacccgaccccccaaaaaaccuccaacuaaaaccccucaaaaacagccgccaaguagaaguauccugggaauaccccgacaccugguccacaccccacuccuacuucucgcucacguucugcguccaaguccaaggcaaauccaaacgagaaaaaaaagaccgcgucuucaccgacaaaacuuccgccaccgucaucugccgcaaaaacgccagcaucagcguccgcgcacaagaccgcuacuacucaagcuccugguccgaaugggccuccgucccaugcuca

SEQ ID NO: 129 - RNA, 921 nt, Artificial Sequence
  IL12B(23-328) CDS mRNA opt9
aucugggaacucaaaaaagacgucuacguagucgaacucgacugguaccccgacgccccaggagaaauggucguacucaccugugacacccccgaagaagacggcaucaccuggacccucgaccaauccuccgaaguccucgguucaggaaaaacccucaccauccaaguaaaagaauuuggcgacgccgggcaauauaccugccacaaaggcggcgagguccuaucccacucacuccuccuccuccacaagaaagaagacggaaucugguccaccgacauccuuaaagaccaaaaagaaccaaaaaacaaaacauuccuccgcugcgaagccaaaaacuacagcggccgcuucaccuguugguggcuaaccacaauaucaaccgacuuaaccuucagcgucaaauccuccagaggauccagcgacccacaaggaguuaccugcggagccgcaacacucagcgccgaacgaguccgcggagacaacaaagaauacgaauacuccgucgaaugccaagaagacucagcaugccccgccgcagaagaaucccuacccaucgaaguaaugguagacgccguccacaaacucaaauacgaaaacuacaccagcuccuucuucauccgagacaucaucaaacccgaccccccaaaaaaccuccaacuaaaaccccucaaaaacagccgccaaguagaaguauccugggaauaccccgacaccugguccacaccccacuccuacuucucgcucacguucugcguccaaguccaaggcaaauccaaacgagaaaaaaaagaccgcgucuucaccgacaaaacuuccgccaccgucaucugccgcaaaaacgccagcaucagcguccgcgcacaagaccgcuacuacucaagcuccugguccgaaugggccuccgucccaugcucauaa

SEQ ID NO: 130 - RNA, 54 nt, Artificial Sequence
  Linker-sFvCC49-218 CDS mRNA opt9
gggaguacgagugggagugggaagccggggaguggggaggggaguacgaagggg

SEQ ID NO: 131 - RNA, 1632 nt, Artificial Sequence
  IL12 CDS mRNA opt9
augugucaccaacaacuuguaaucagcugguucucccucgucuuccucgccucaccccucgucgccaucugggaacucaaaaaagacgucuacguagucgaacucgacugguaccccgacgccccaggagaaauggucguacucaccugugacacccccgaagaagacggcaucaccuggacccucgaccaauccuccgaaguccucgguucaggaaaaacccucaccauccaaguaaaagaauuuggcgacgccgggcaauauaccugccacaaaggcggcgagguccuaucccacucacuccuccuccuccacaagaaagaagacggaaucugguccaccgacauccuuaaagaccaaaaagaaccaaaaaacaaaacauuccuccgcugcgaagccaaaaacuacagcggccgcuucaccuguugguggcuaaccacaauaucaaccgacuuaaccuucagcgucaaauccuccagaggauccagcgacccacaaggaguuaccugcggagccgcaacacucagcgccgaacgaguccgcggagacaacaaagaauacgaauacuccgucgaaugccaagaagacucagcaugccccgccgcagaagaaucccuacccaucgaaguaaugguagacgccguccacaaacucaaauacgaaaacuacaccagcuccuucuucauccgagacaucaucaaacccgaccccccaaaaaaccuccaacuaaaaccccucaaaaacagccgccaaguagaaguauccugggaauaccccgacaccugguccacaccccacuccuacuucucgcucacguucugcguccaaguccaaggcaaauccaaacgagaaaaaaaagaccgcgucuucaccgacaaaacuuccgccaccgucaucugccgcaaaaacgccagcaucagcguccgcgcacaagaccgcuacuacucaagcuccugguccgaaugggccuccgucccaugcucagggaguacgagugggagugggaagccggggaguggggaggggaguacgaaggggcguaaccucccagucgccaccccagaccccggaauguuccccugccuccaucacucccaaaaucuccuccgugccgucuccaacaugcuccaaaaagcccgccaaacccucgaauuuuauccaugcaccuccgaagaaauagaccaugaagacaucaccaaagacaaaacauccaccgucgaagccugccucccccucgaacucacaaaaaacgaaucaugccucaacucccgcgaaaccuccuucauaaccaacggcucaugccucgccucucgcaaaaccucauucaugauggcccucugccuauccucuaucuacgaagaccucaaaauguaccaagucgaauuuaaaaccaugaacgccaaacuccucauggaccccaaacgccaaaucuuccucgaccaaaacaugcucgcagucaucgacgaacucaugcaagcacucaacuucaacucagaaaccgucccccaaaaauccucccucgaagaacccgacuucuacaaaacaaaaauaaaacucugcauccuccuccacgccuuccgcauccgagcagucaccaucgaucgcgucauguccuaccuaaacgccuccuaa

SEQ ID NO: 132 - RNA, 786 nt, Artificial Sequence
  CD40LG CDS mRNA opt9
augaucgaaacauacaaccaaacauccccccgcuccgccgccacaggccuccccaucuccaugaaaaucuucauguaccuccucacaguauuccucaucacccaaaugaucggcuccgcacucuuugcagucuaucuccaccgucgccucgacaaaaucgaagacgaacgcaaccuccacgaagacuucgucuucaugaaaaccauacaacgcugcaacaccggcgaacgcucacucucccuacuaaacugcgaagaaaucaaaucccaauucgaaggcuucgucaaagacaucaugcuaaacaaagaagaaacaaaaaaagaaaacuccuucgaaaugcaaaaaggcgaccaaaacccccaaauagccgcccacgucaucuccgaagccuccuccaaaaccaccuccguccuccaaugggccgaaaaaggcuacuacacaauguccaacaaccucgucacccucgaaaacggcaaacaacucaccgucaaacgccaaggccucuacuacaucuacgcccaaguaaccuucugcuccaaccgcgaagccucaucucaagcucccuucaucgccucacucugccucaaaucacccggccgcuucgaaagaauccuccuccgcgccgcaaacacccacucauccgccaaacccugcggccaacaauccauacaccucggcggcguuuucgagcuccaaccuggcgccuccgucuucguaaacgucaccgaccccucacaagucucccacgguaccggcuucaccuccuucggacuccuaaaacucuaa

SEQ ID NO: 133 - RNA, 867 nt, Artificial Sequence
  PDCD1 CDS mRNA opt10
augcaaaucccccaagcccccuggccggucgucugggccguccuccaacucggcuggcgccccggaugguuccucgacucccccgaccgcccguggaacccccccaccuucucccccgcccuccuagucgucaccgaaggcgacaacgccaccuucaccuguuccuucuccaacaccucagaauccuucguccucaacugguaccgcaugucccccuccaaccaaaccgacaaacucgccgccuuccccgaagaccgaucccaacccggccaagacugccgcuuccgcgucacacaacuucccaacggacgcgacuuucacauguccgucguccgcgcccgccgcaacgacuccggcaccuaccucugcggcgccaucucccucgcccccaaagcccaaaucaaagaaucccucagagccgaacuccgcgucaccgaacggcgcgccgaaguccccacugcccaccccucccccuccccccgccccgccggccaauuccaaacccucgucgucggcguugucggcggccuccucggcucacucguccuccucgucuggguacucgccgucaucugcucccgcgccgcgcgcggcaccaucggcgcgcgccgcaccggacaaccccuaaaagaagaccccuccgccguccccgucuucuccgucgacuacggcgaacucgacuuccaauggcgcgaaaaaaccccggaaccccccgucccgugcguccccgaacaaacagaauacgcgaccaucgucuucccguccggcaugggcacauccucacccgcccgccgaggcuccgccgacggcccccgauccgcccaaccccuacgccccgaagacggccacugcuccuggccccucuaa

SEQ ID NO: 134 - RNA, 450 nt, Artificial Sequence
  PDCD1(1-149) CDS mRNA opt10
augcaaaucccccaagcccccuggccggucgucugggccguccuccaacucggcuggcgccccggaugguuccucgacucccccgaccgcccguggaacccccccaccuucucccccgcccuccuagucgucaccgaaggcgacaacgccaccuucaccuguuccuucuccaacaccucagaauccuucguccucaacugguaccgcaugucccccuccaaccaaaccgacaaacucgccgccuuccccgaagaccgaucccaacccggccaagacugccgcuuccgcgucacacaacuucccaacggacgcgacuuucacauguccgucguccgcgcccgccgcaacgacuccggcaccuaccucugcggcgccaucucccucgcccccaaagcccaaaucaaagaaucccucagagccgaacuccgcgucaccgaacggcgcgccuaa

SEQ ID NO: 135 - RNA, 660 nt, Artificial Sequence
  IL12A CDS mRNA opt10
augugccccgcccguucacuccuccucgucgccacccucguccuccuagaccaccucucccuggcccgcaaccucccagucgccacccccgaccccggcauguuccccugccuccaccacucccaaaaccuccuccgcgccgucuccaacaugcuccaaaaagcccgccaaacccucgaauuuuaccccugcaccuccgaagagaucgaccacgaagacaucaccaaagacaaaaccuccacagucgaagccugccucccccucgaacucaccaaaaacgaauccugccuuaacucccgcgaaaccuccuucaucaccaacggcuccugccucgccucccgcaaaaccuccuucaugauggcccucugccucuccuccaucuacgaagaccucaaaauguaccaagucgaauuuaaaaccaugaacgccaaacuccucauggaccccaaacgccaaaucuuccucgaccaaaacaugcucgccgucaucgacgaacucaugcaagcccucaacuucaacuccgaaaccgucccccaaaaauccucccucgaagaacccgacuucuacaaaaccaaaaucaaacuuugcauccuccuccacgcauuccgcauccgcgccgucaccaucgaccgugucaugagcuaccuaaacgccuccuga

SEQ ID NO: 136 - RNA, 657 nt, Artificial Sequence
  IL12A(1-219) CDS mRNA opt10
augugccccgcccguucacuccuccucgucgccacccucguccuccuagaccaccucucccuggcccgcaaccucccagucgccacccccgaccccggcauguuccccugccuccaccacucccaaaaccuccuccgcgccgucuccaacaugcuccaaaaagcccgccaaacccucgaauuuuaccccugcaccuccgaagagaucgaccacgaagacaucaccaaagacaaaaccuccacagucgaagccugccucccccucgaacucaccaaaaacgaauccugccuuaacucccgcgaaaccuccuucaucaccaacggcuccugccucgccucccgcaaaaccuccuucaugauggcccucugccucuccuccaucuacgaagaccucaaaauguaccaagucgaauuuaaaaccaugaacgccaaacuccucauggaccccaaacgccaaaucuuccucgaccaaaacaugcucgccgucaucgacgaacucaugcaagcccucaacuucaacuccgaaaccgucccccaaaaauccucccucgaagaacccgacuucuacaaaaccaaaaucaaacuuugcauccuccuccacgcauuccgcauccgcgccgucaccaucgaccgugucaugagcuaccuaaacgccucc

SEQ ID NO: 137 - RNA, 594 nt, Artificial Sequence
  IL12A(23-219) CDS mRNA opt10
cgcaaccucccagucgccacccccgaccccggcauguuccccugccuccaccacucccaaaaccuccuccgcgccgucuccaacaugcuccaaaaagcccgccaaacccucgaauuuuaccccugcaccuccgaagagaucgaccacgaagacaucaccaaagacaaaaccuccacagucgaagccugccucccccucgaacucaccaaaaacgaauccugccuuaacucccgcgaaaccuccuucaucaccaacggcuccugccucgccucccgcaaaaccuccuucaugauggcccucugccucuccuccaucuacgaagaccucaaaauguaccaagucgaauuuaaaaccaugaacgccaaacuccucauggaccccaaacgccaaaucuuccucgaccaaaacaugcucgccgucaucgacgaacucaugcaagcccucaacuucaacuccgaaaccgucccccaaaaauccucccucgaagaacccgacuucuacaaaaccaaaaucaaacuuugcauccuccuccacgcauuccgcauccgcgccgucaccaucgaccgugucaugagcuaccuaaacgccuccuga

SEQ ID NO: 138 - RNA, 987 nt, Artificial Sequence
  IL12B CDS mRNA opt10
augugccaccaacaacucgucaucuccugguucucccucgucuuccuagccuccccacucgucgccaucugggaacucaaaaaagacguauacgucgucgaacucgacugguaccccgacgccccaggagaaauggucguccuaaccugcgacacacccgaagaagacgguaucaccuggacccucgaccaauccuccgaaguccuaggcuccggcaagacccucaccauccaagucaaagaauuuggcgacgcaggacaauacaccugucacaaaggcggcgaaguccucagccacagccuucuccuacuccauaaaaaagaagacggcaucugguccacugacauccucaaagaccaaaaagaacccaaaaauaaaaccuuccuccgcugcgaagccaaaaacuacuccggccgauucaccuguugguggcuaaccacaaucagcaccgaccucaccuucucagucaaauccucccgcggcucaucugacccccaaggcgucacaugcggcgccgccacccucuccgccgaacgcguccgcggcgacaacaaagaauacgaauacuccgucgaaugucaagaagacuccgccugccccgccgccgaagaaucacuccccaucgaagucauggucgacgcaguccacaaacucaaauacgaaaacuacaccuccuccuucuucauccgcgacauaauaaaacccgacccacccaaaaaccuccaacucaagccacucaaaaacucccgacaagucgaagucuccugggaguaccccgacaccugguccacaccacacuccuacuucucccucaccuucugcguccaaguccaaggcaaauccaaacgcgaaaaaaaagaccgcguuuucacagacaaaaccuccgccacaguaauaugccgcaaaaacgccuccaucuccguccgggcccaagaccgcuacuacuccuccuccugguccgagugggccucaguccccugcagcuaa

SEQ ID NO: 139 - RNA, 984 nt, Artificial Sequence
  IL12B(1-328) CDS mRNA opt10
augugccaccaacaacucgucaucuccugguucucccucgucuuccuagccuccccacucgucgccaucugggaacucaaaaaagacguauacgucgucgaacucgacugguaccccgacgccccaggagaaauggucguccuaaccugcgacacacccgaagaagacgguaucaccuggacccucgaccaauccuccgaaguccuaggcuccggcaagacccucaccauccaagucaaagaauuuggcgacgcaggacaauacaccugucacaaaggcggcgaaguccucagccacagccuucuccuacuccauaaaaaagaagacggcaucugguccacugacauccucaaagaccaaaaagaacccaaaaauaaaaccuuccuccgcugcgaagccaaaaacuacuccggccgauucaccuguugguggcuaaccacaaucagcaccgaccucaccuucucagucaaauccucccgcggcucaucugacccccaaggcgucacaugcggcgccgccacccucuccgccgaacgcguccgcggcgacaacaaagaauacgaauacuccgucgaaugucaagaagacuccgccugccccgccgccgaagaaucacuccccaucgaagucauggucgacgcaguccacaaacucaaauacgaaaacuacaccuccuccuucuucauccgcgacauaauaaaacccgacccacccaaaaaccuccaacucaagccacucaaaaacucccgacaagucgaagucuccugggaguaccccgacaccugguccacaccacacuccuacuucucccucaccuucugcguccaaguccaaggcaaauccaaacgcgaaaaaaaagaccgcguuuucacagacaaaaccuccgccacaguaauaugccgcaaaaacgccuccaucuccguccgggcccaagaccgcuacuacuccuccuccugguccgagugggccucaguccccugcagc

SEQ ID NO: 140 - RNA, 921 nt, Artificial Sequence
  IL12B(23-328) CDS mRNA opt10
aucugggaacucaaaaaagacguauacgucgucgaacucgacugguaccccgacgccccaggagaaauggucguccuaaccugcgacacacccgaagaagacgguaucaccuggacccucgaccaauccuccgaaguccuaggcuccggcaagacccucaccauccaagucaaagaauuuggcgacgcaggacaauacaccugucacaaaggcggcgaaguccucagccacagccuucuccuacuccauaaaaaagaagacggcaucugguccacugacauccucaaagaccaaaaagaacccaaaaauaaaaccuuccuccgcugcgaagccaaaaacuacuccggccgauucaccuguugguggcuaaccacaaucagcaccgaccucaccuucucagucaaauccucccgcggcucaucugacccccaaggcgucacaugcggcgccgccacccucuccgccgaacgcguccgcggcgacaacaaagaauacgaauacuccgucgaaugucaagaagacuccgccugccccgccgccgaagaaucacuccccaucgaagucauggucgacgcaguccacaaacucaaauacgaaaacuacaccuccuccuucuucauccgcgacauaauaaaacccgacccacccaaaaaccuccaacucaagccacucaaaaacucccgacaagucgaagucuccugggaguaccccgacaccugguccacaccacacuccuacuucucccucaccuucugcguccaaguccaaggcaaauccaaacgcgaaaaaaaagaccgcguuuucacagacaaaaccuccgccacaguaauaugccgcaaaaacgccuccaucuccguccgggcccaagaccgcuacuacuccuccuccugguccgagugggccucaguccccugcagcuaa

SEQ ID NO: 141 - RNA, 54 nt, Artificial Sequence; identical to SEQ ID NO: 130
  Linker-sFvCC49-218 CDS mRNA opt10

SEQ ID NO: 142 - RNA, 1632 nt, Artificial Sequence
  IL12 CDS mRNA opt10
augugccaccaacaacucgucaucuccugguucucccucgucuuccuagccuccccacucgucgccaucugggaacucaaaaaagacguauacgucgucgaacucgacugguaccccgacgccccaggagaaauggucguccuaaccugcgacacacccgaagaagacgguaucaccuggacccucgaccaauccuccgaaguccuaggcuccggcaagacccucaccauccaagucaaagaauuuggcgacgcaggacaauacaccugucacaaaggcggcgaaguccucagccacagccuucuccuacuccauaaaaaagaagacggcaucugguccacugacauccucaaagaccaaaaagaacccaaaaauaaaaccuuccuccgcugcgaagccaaaaacuacuccggccgauucaccuguugguggcuaaccacaaucagcaccgaccucaccuucucagucaaauccucccgcggcucaucugacccccaaggcgucacaugcggcgccgccacccucuccgccgaacgcguccgcggcgacaacaaagaauacgaauacuccgucgaaugucaagaagacuccgccugccccgccgccgaagaaucacuccccaucgaagucauggucgacgcaguccacaaacucaaauacgaaaacuacaccuccuccuucuucauccgcgacauaauaaaacccgacccacccaaaaaccuccaacucaagccacucaaaaacucccgacaagucgaagucuccugggaguaccccgacaccugguccacaccacacuccuacuucucccucaccuucugcguccaaguccaaggcaaauccaaacgcgaaaaaaaagaccgcguuuucacagacaaaaccuccgccacaguaauaugccgcaaaaacgccuccaucuccguccgggcccaagaccgcuacuacuccuccuccugguccgagugggccucaguccccugcagcgggaguacgagugggagugggaagccggggaguggggaggggaguacgaaggggcgcaaccucccagucgccacccccgaccccggcauguuccccugccuccaccacucccaaaaccuccuccgcgccgucuccaacaugcuccaaaaagcccgccaaacccucgaauuuuaccccugcaccuccgaagagaucgaccacgaagacaucaccaaagacaaaaccuccacagucgaagccugccucccccucgaacucaccaaaaacgaauccugccuuaacucccgcgaaaccuccuucaucaccaacggcuccugccucgccucccgcaaaaccuccuucaugauggcccucugccucuccuccaucuacgaagaccucaaaauguaccaagucgaauuuaaaaccaugaacgccaaacuccucauggaccccaaacgccaaaucuuccucgaccaaaacaugcucgccgucaucgacgaacucaugcaagcccucaacuucaacuccgaaaccgucccccaaaaauccucccucgaagaacccgacuucuacaaaaccaaaaucaaacuuugcauccuccuccacgcauuccgcauccgcgccgucaccaucgaccgugucaugagcuaccuaaacgccuccuga

SEQ ID NO: 143 - RNA, 786 nt, Artificial Sequence
  CD40LG CDS mRNA opt10
augaucgaaaccuacaaucaaaccuccccccgcagcgccgcaacaggccuccccaucuccaugaaaaucuucauguaccuccucaccgucuuccuaaucacccaaaugaucggcuccgcccuauucgccgucuaccuccaccgccgccucgacaaaaucgaagacgaacgcaaccuccacgaagacuuugucuucaugaaaacuauccaacgaugcaacaccggcgaacgaucccuaucccuccucaacugcgaagaaauaaaaucccaauucgaaggauucgucaaagacaucaugcuaaacaaagaagaaaccaaaaaagaaaacuccuucgaaaugcaaaaaggcgaccaaaacccccaaaucgcagcccacgucaucucagaagcaucuuccaaaaccaccuccguccuccaaugggccgaaaaaggcuacuacaccaugucaaacaaccucgucacccucgaaaacggcaaacaacucaccgucaaacgccaaggccucuacuacaucuacgcacaagucaccuucugcuccaaccgcgaagcauccucccaagcccccuucaucgccucccucugccucaaaucccccggccgcuucgaacgcauccuccuccgcgccgcaaauacccacuccuccgccaaaccaugcggccaacaauccauccaccucggcggcgucuucgaacuccaacccggcgccuccgucuucgucaacgucaccgaccccucccaaguaucccauggaaccggcuucaccuccuucggccuccucaaacucuag

SEQ ID NO: 144 - RNA, 1084 nt, Artificial Sequence
  PDCD1 mRNA product wild type
gggagaaagcuuaccaugcagaucccacaggcgcccuggccagucgucugggcggugcuacaacugggcuggcggccaggaugguucuuagacuccccagacaggcccuggaacccccccaccuucuccccagcccugcucguggugaccgaaggggacaacgccaccuucaccugcagcuucuccaacacaucggagagcuucgugcuaaacugguaccgcaugagccccagcaaccagacggacaagcuggccgcuuuccccgaggaccgcagccagcccggccaggacugccgcuuccgugucacacaacugcccaacgggcgugacuuccacaugagcguggucagggcccggcgcaaugacagcggcaccuaccucuguggggccaucucccuggcccccaaggcgcagaucaaagagagccugcgggcagagcucagggugacagagagaagggcagaagugcccacagcccaccccagccccucacccaggccagccggccaguuccaaacccuggugguuggugucgugggcggccugcugggcagccuggugcugcuagucuggguccuggccgucaucugcucccgggccgcacgagggacaauaggagccaggcgcaccggccagccccugaaggaggaccccucagccgugccuguguucucuguggacuauggggagcuggauuuccaguggcgagagaagaccccggagccccccgugcccugugucccugagcagacggaguaugccaccauugucuuuccuagcggaaugggcaccucaucccccgcccgcaggggcucagccgacggcccucggagugcccagccacugaggccugaggauggacacugcucuuggccccucugaggacuaguuauaagacugacuagcccgaugggccucccaacgggcccuccuccccuccuugcaccgagauuaauaaaaaaaaaaaaaaaaaaaaaaaaaaaaaaaaaaaaaaaaaaaaaaaaaaaaaaaaaaaaaaaaugcaucccccccccccccccccccccccccccccccaaaggcucuuuucagagccaccagaauu

SEQ ID NO: 145 - RNA, 667 nt, Artificial Sequence
  PDCD1(1-149) mRNA product wild type
gggagaaagcuuaccaugcagaucccacaggcgcccuggccagucgucugggcggugcuacaacugggcuggcggccaggaugguucuuagacuccccagacaggcccuggaacccccccaccuucuccccagcccugcucguggugaccgaaggggacaacgccaccuucaccugcagcuucuccaacacaucggagagcuucgugcuaaacugguaccgcaugagccccagcaaccagacggacaagcuggccgcuuuccccgaggaccgcagccagcccggccaggacugccgcuuccgugucacacaacugcccaacgggcgugacuuccacaugagcguggucagggcccggcgcaaugacagcggcaccuaccucuguggggccaucucccuggcccccaaggcgcagaucaaagagagccugcgggcagagcucagggugacagagagaagggcaugaggacuaguuauaagacugacuagcccgaugggccucccaacgggcccuccuccccuccuugcaccgagauuaauaaaaaaaaaaaaaaaaaaaaaaaaaaaaaaaaaaaaaaaaaaaaaaaaaaaaaaaaaaaaaaaaugcaucccccccccccccccccccccccccccccccaaaggcucuuuucagagccaccagaauu

SEQ ID NO: 146 - RNA, 877 nt, Artificial Sequence
  IL12A mRNA product wild type
gggagaaagcuuaccauguguccagcgcgcagccuccuccuuguggcuacccugguccuccuggaccaccucaguuuggccagaaaccuccccguggccacuccagacccaggaauguucccaugccuucaccacucccaaaaccugcugagggccgucagcaacaugcuccagaaggccagacaaacucuagaauuuuacccuugcacuucugaagagauugaucaugaagauaucacaaaagauaaaaccagcacaguggaggccuguuuaccauuggaauuaaccaagaaugagaguugccuaaauuccagagagaccucuuucauaacuaaugggaguugccuggccuccagaaagaccucuuuuaugauggcccugugccuuaguaguauuuaugaagacuugaagauguaccagguggaguucaagaccaugaaugcaaagcuucugauggauccuaagaggcagaucuuucuagaucaaaacaugcuggcaguuauugaugagcugaugcaggcccugaauuucaacagugagacugugccacaaaaauccucccuugaagaaccggauuuuuauaaaacuaaaaucaagcucugcauacuucuucaugcuuucagaauucgggcagugacuauugauagagugaugagcuaucugaaugcuuccuaaggacuaguuauaagacugacuagcccgaugggccucccaacgggcccuccuccccuccuugcaccgagauuaauaaaaaaaaaaaaaaaaaaaaaaaaaaaaaaaaaaaaaaaaaaaaaaaaaaaaaaaaaaaaaaaaugcaucccccccccccccccccccccccccccccccaaaggcucuuuucagagccaccagaauu

SEQ ID NO: 147 - RNA, 874 nt, Artificial Sequence
  IL12A(1-219) mRNA product wild type
gggagaaagcuuaccauguguccagcgcgcagccuccuccuuguggcuacccugguccuccuggaccaccucaguuuggccagaaaccuccccguggccacuccagacccaggaauguucccaugccuucaccacucccaaaaccugcugagggccgucagcaacaugcuccagaaggccagacaaacucuagaauuuuacccuugcacuucugaagagauugaucaugaagauaucacaaaagauaaaaccagcacaguggaggccuguuuaccauuggaauuaaccaagaaugagaguugccuaaauuccagagagaccucuuucauaacuaaugggaguugccuggccuccagaaagaccucuuuuaugauggcccugugccuuaguaguauuuaugaagacuugaagauguaccagguggaguucaagaccaugaaugcaaagcuucugauggauccuaagaggcagaucuuucuagaucaaaacaugcuggcaguuauugaugagcugaugcaggcccugaauuucaacagugagacugugccacaaaaauccucccuugaagaaccggauuuuuauaaaacuaaaaucaagcucugcauacuucuucaugcuuucagaauucgggcagugacuauugauagagugaugagcuaucugaaugcuuccggacuaguuauaagacugacuagcccgaugggccucccaacgggcccuccuccccuccuugcaccgagauuaauaaaaaaaaaaaaaaaaaaaaaaaaaaaaaaaaaaaaaaaaaaaaaaaaaaaaaaaaaaaaaaaaugcaucccccccccccccccccccccccccccccccaaaggcucuuuucagagccaccagaauu

SEQ ID NO: 148 - RNA, 811 nt, Artificial Sequence
  IL12A(23-219) mRNA product wild type
gggagaaagcuuaccagaaaccuccccguggccacuccagacccaggaauguucccaugccuucaccacucccaaaaccugcugagggccgucagcaacaugcuccagaaggccagacaaacucuagaauuuuacccuugcacuucugaagagauugaucaugaagauaucacaaaagauaaaaccagcacaguggaggccuguuuaccauuggaauuaaccaagaaugagaguugccuaaauuccagagagaccucuuucauaacuaaugggaguugccuggccuccagaaagaccucuuuuaugauggcccugugccuuaguaguauuuaugaagacuugaagauguaccagguggaguucaagaccaugaaugcaaagcuucugauggauccuaagaggcagaucuuucuagaucaaaacaugcuggcaguuauugaugagcugaugcaggcccugaauuucaacagugagacugugccacaaaaauccucccuugaagaaccggauuuuuauaaaacuaaaaucaagcucugcauacuucuucaugcuuucagaauucgggcagugacuauugauagagugaugagcuaucugaaugcuuccuaaggacuaguuauaagacugacuagcccgaugggccucccaacgggcccuccuccccuccuugcaccgagauuaauaaaaaaaaaaaaaaaaaaaaaaaaaaaaaaaaaaaaaaaaaaaaaaaaaaaaaaaaaaaaaaaaugcaucccccccccccccccccccccccccccccccaaaggcucuuuucagagccaccagaauu

SEQ ID NO: 149 - RNA, 1204 nt, Artificial Sequence
  IL12B mRNA product wild type
gggagaaagcuuaccaugugucaccagcaguuggucaucucuugguuuucccugguuuuucuggcaucuccccucguggccauaugggaacugaagaaagauguuuaugucguagaauuggauugguauccggaugccccuggagaaauggugguccucaccugugacaccccugaagaagaugguaucaccuggaccuuggaccagagcagugaggucuuaggcucuggcaaaacccugaccauccaagucaaagaguuuggagaugcuggccaguacaccugucacaaaggaggcgagguucuaagccauucgcuccugcugcuucacaaaaaggaagauggaauuugguccacugauauuuuaaaggaccagaaagaacccaaaaauaagaccuuucuaagaugcgaggccaagaauuauucuggacguuucaccugcugguggcugacgacaaucaguacugauuugacauucagugucaaaagcagcagaggcucuucugacccccaaggggugacgugcggagcugcuacacucucugcagagagagucagaggggacaacaaggaguaugaguacucaguggagugccaggaggacagugccugcccagcugcugaggagagucugcccauugaggucaugguggaugccguucacaagcucaaguaugaaaacuacaccagcagcuucuucaucagggacaucaucaaaccugacccacccaagaacuugcagcugaagccauuaaagaauucucggcagguggaggucagcugggaguacccugacaccuggaguacuccacauuccuacuucucccugacauucugcguucagguccagggcaagagcaagagagaaaagaaagauagagucuucacggacaagaccucagccacggucaucugccgcaaaaaugccagcauuagcgugcgggcccaggaccgcuacuauagcucaucuuggagcgaaugggcaucugugcccugcaguuagggacuaguuauaagacugacuagcccgaugggccucccaacgggcccuccuccccuccuugcaccgagauuaauaaaaaaaaaaaaaaaaaaaaaaaaaaaaaaaaaaaaaaaaaaaaaaaaaaaaaaaaaaaaaaaaugcaucccccccccccccccccccccccccccccccaaaggcucuuuucagagccaccagaauu

SEQ ID NO: 150 - RNA, 1201 nt, Artificial Sequence
  IL12B(1-328) mRNA product wild type
gggagaaagcuuaccaugugucaccagcaguuggucaucucuugguuuucccugguuuuucuggcaucuccccucguggccauaugggaacugaagaaagauguuuaugucguagaauuggauugguauccggaugccccuggagaaauggugguccucaccugugacaccccugaagaagaugguaucaccuggaccuuggaccagagcagugaggucuuaggcucuggcaaaacccugaccauccaagucaaagaguuuggagaugcuggccaguacaccugucacaaaggaggcgagguucuaagccauucgcuccugcugcuucacaaaaaggaagauggaauuugguccacugauauuuuaaaggaccagaaagaacccaaaaauaagaccuuucuaagaugcgaggccaagaauuauucuggacguuucaccugcugguggcugacgacaaucaguacugauuugacauucagugucaaaagcagcagaggcucuucugacccccaaggggugacgugcggagcugcuacacucucugcagagagagucagaggggacaacaaggaguaugaguacucaguggagugccaggaggacagugccugcccagcugcugaggagagucugcccauugaggucaugguggaugccguucacaagcucaaguaugaaaacuacaccagcagcuucuucaucagggacaucaucaaaccugacccacccaagaacuugcagcugaagccauuaaagaauucucggcagguggaggucagcugggaguacccugacaccuggaguacuccacauuccuacuucucccugacauucugcguucagguccagggcaagagcaagagagaaaagaaagauagagucuucacggacaagaccucagccacggucaucugccgcaaaaaugccagcauuagcgugcgggcccaggaccgcuacuauagcucaucuuggagcgaaugggcaucugugcccugcaguggacuaguuauaagacugacuagcccgaugggccucccaacgggcccuccuccccuccuugcaccgagauuaauaaaaaaaaaaaaaaaaaaaaaaaaaaaaaaaaaaaaaaaaaaaaaaaaaaaaaaaaaaaaaaaaugcaucccccccccccccccccccccccccccccccaaaggcucuuuucagagccaccagaauu

SEQ ID NO: 151 - RNA, 1138 nt, Artificial Sequence
  IL12B(23-328) mRNA product wild type
gggagaaagcuuaccauaugggaacugaagaaagauguuuaugucguagaauuggauugguauccggaugccccuggagaaauggugguccucaccugugacaccccugaagaagaugguaucaccuggaccuuggaccagagcagugaggucuuaggcucuggcaaaacccugaccauccaagucaaagaguuuggagaugcuggccaguacaccugucacaaaggaggcgagguucuaagccauucgcuccugcugcuucacaaaaaggaagauggaauuugguccacugauauuuuaaaggaccagaaagaacccaaaaauaagaccuuucuaagaugcgaggccaagaauuauucuggacguuucaccugcugguggcugacgacaaucaguacugauuugacauucagugucaaaagcagcagaggcucuucugacccccaaggggugacgugcggagcugcuacacucucugcagagagagucagaggggacaacaaggaguaugaguacucaguggagugccaggaggacagugccugcccagcugcugaggagagucugcccauugaggucaugguggaugccguucacaagcucaaguaugaaaacuacaccagcagcuucuucaucagggacaucaucaaaccugacccacccaagaacuugcagcugaagccauuaaagaauucucggcagguggaggucagcugggaguacccugacaccuggaguacuccacauuccuacuucucccugacauucugcguucagguccagggcaagagcaagagagaaaagaaagauagagucuucacggacaagaccucagccacggucaucugccgcaaaaaugccagcauuagcgugcgggcccaggaccgcuacuauagcucaucuuggagcgaaugggcaucugugcccugcaguuagggacuaguuauaagacugacuagcccgaugggccucccaacgggcccuccuccccuccuugcaccgagauuaauaaaaaaaaaaaaaaaaaaaaaaaaaaaaaaaaaaaaaaaaaaaaaaaaaaaaaaaaaaaaaaaaugcaucccccccccccccccccccccccccccccccaaaggcucuuuucagagccaccagaauu

SEQ ID NO: 152 - RNA, 271 nt, Artificial Sequence
  Linker-sFvCC49-218 mRNA product wild type
gggagaaagcuuaccggcaguacuucgggcagugguaagccugguaguggugaggguaguacuaaggguggacuaguuauaagacugacuagcccgaugggccucccaacgggcccuccuccccuccuugcaccgagauuaauaaaaaaaaaaaaaaaaaaaaaaaaaaaaaaaaaaaaaaaaaaaaaaaaaaaaaaaaaaaaaaaaugcaucccccccccccccccccccccccccccccccaaaggcucuuuucagagccaccagaauu

SEQ ID NO: 153 - RNA, 1849 nt, Artificial Sequence
  IL12 mRNA product wild type
gggagaaagcuuaccaugugucaccagcaguuggucaucucuugguuuucccugguuuuucuggcaucuccccucguggccauaugggaacugaagaaagauguuuaugucguagaauuggauugguauccggaugccccuggagaaauggugguccucaccugugacaccccugaagaagaugguaucaccuggaccuuggaccagagcagugaggucuuaggcucuggcaaaacccugaccauccaagucaaagaguuuggagaugcuggccaguacaccugucacaaaggaggcgagguucuaagccauucgcuccugcugcuucacaaaaaggaagauggaauuugguccacugauauuuuaaaggaccagaaagaacccaaaaauaagaccuuucuaagaugcgaggccaagaauuauucuggacguuucaccugcugguggcugacgacaaucaguacugauuugacauucagugucaaaagcagcagaggcucuucugacccccaaggggugacgugcggagcugcuacacucucugcagagagagucagaggggacaacaaggaguaugaguacucaguggagugccaggaggacagugccugcccagcugcugaggagagucugcccauugaggucaugguggaugccguucacaagcucaaguaugaaaacuacaccagcagcuucuucaucagggacaucaucaaaccugacccacccaagaacuugcagcugaagccauuaaagaauucucggcagguggaggucagcugggaguacccugacaccuggaguacuccacauuccuacuucucccugacauucugcguucagguccagggcaagagcaagagagaaaagaaagauagagucuucacggacaagaccucagccacggucaucugccgcaaaaaugccagcauuagcgugcgggcccaggaccgcuacuauagcucaucuuggagcgaaugggcaucugugcccugcaguggcaguacuucgggcagugguaagccugguaguggugaggguaguacuaaggguagaaaccuccccguggccacuccagacccaggaauguucccaugccuucaccacucccaaaaccugcugagggccgucagcaacaugcuccagaaggccagacaaacucuagaauuuuacccuugcacuucugaagagauugaucaugaagauaucacaaaagauaaaaccagcacaguggaggccuguuuaccauuggaauuaaccaagaaugagaguugccuaaauuccagagagaccucuuucauaacuaaugggaguugccuggccuccagaaagaccucuuuuaugauggcccugugccuuaguaguauuuaugaagacuugaagauguaccagguggaguucaagaccaugaaugcaaagcuucugauggauccuaagaggcagaucuuucuagaucaaaacaugcuggcaguuauugaugagcugaugcaggcccugaauuucaacagugagacugugccacaaaaauccucccuugaagaaccggauuuuuauaaaacuaaaaucaagcucugcauacuucuucaugcuuucagaauucgggcagugacuauugauagagugaugagcuaucugaaugcuuccuaaggacuaguuauaagacugacuagcccgaugggccucccaacgggcccuccuccccuccuugcaccgagauuaauaaaaaaaaaaaaaaaaaaaaaaaaaaaaaaaaaaaaaaaaaaaaaaaaaaaaaaaaaaaaaaaaugcaucccccccccccccccccccccccccccccccaaaggcucuuuucagagccaccagaauu

SEQ ID NO: 154 - RNA, 1003 nt, Artificial Sequence
  CD40LG mRNA product wild type
gggagaaagcuuaccaugaucgaaacauacaaccaaacuucuccccgaucugcggccacuggacugcccaucagcaugaaaauuuuuauguauuuacuuacuguuuuucuuaucacccagaugauugggucagcacuuuuugcuguguaucuucauagaagguuggacaagauagaagaugaaaggaaucuucaugaagauuuuguauucaugaaaacgauacagagaugcaacacaggagaaagauccuuauccuuacugaacugugaggagauuaaaagccaguuugaaggcuuugugaaggauauaauguuaaacaaagaggagacgaagaaagaaaacagcuuugaaaugcaaaaaggugaucagaauccucaaauugcggcacaugucauaagugaggccagcaguaaaacaacaucuguguuacagugggcugaaaaaggauacuacaccaugagcaacaacuugguaacccuggaaaaugggaaacagcugaccguuaaaagacaaggacucuauuauaucuaugcccaagucaccuucuguuccaaucgggaagcuucgagucaagcuccauuuauagccagccucugccuaaagucccccgguagauucgagagaaucuuacucagagcugcaaauacccacaguuccgccaaaccuugcgggcaacaauccauucacuugggaggaguauuugaauugcaaccaggugcuucgguguuugucaaugugacugauccaagccaagugagccauggcacuggcuucacguccuuuggcuuacucaaacucugaggacuaguuauaagacugacuagcccgaugggccucccaacgggcccuccuccccuccuugcaccgagauuaauaaaaaaaaaaaaaaaaaaaaaaaaaaaaaaaaaaaaaaaaaaaaaaaaaaaaaaaaaaaaaaaaugcaucccccccccccccccccccccccccccccccaaaggcucuuuucagagccaccagaauu

SEQ ID NO: 155 - RNA, 1084 nt, Artificial Sequence
  PDCD1 mRNA product opt1
gggagaaagcuuaccaugcagaucccccaggccccguggcccguggucugggccgugcugcagcucggcuggcgccccgggugguuccuggacagccccgaccggccguggaacccgcccaccuucucccccgcgcugcucguggucaccgagggcgacaacgccacguucacgugcagcuucuccaacaccagcgaguccuucgugcugaacugguaccgcaugagccccuccaaccagaccgacaagcuggccgccuuccccgaggaccggagccagcccgggcaggacugccgcuuccgggugacccagcuccccaacggccgcgacuuccacauguccgucgugcgggcccgccggaacgacagcgggaccuaccugugcggcgcgaucucccuggccccgaaggcccagaucaaggagagccuccgcgccgagcugcgggugaccgagcgccgggcggagguccccaccgcccaccccucccccagcccgcgccccgccggccaguuccagacgcugguggugggggucgugggcgggcuccugggcucccuggugcuccuggucugggugcuggccgugaucugcagccgggccgcgcgcgggaccaucggcgcccggcgcaccggccagccccucaaggaggaccccuccgccgucccgguguucagcguggacuacggggagcuggacuuccaguggcgggagaagacccccgagccgcccguccccugcgugcccgagcagacggaguacgccaccaucguguuccccuccggcauggggaccagcagccccgcccgccggggcuccgcggacggcccgcgcagcgcccagccccugcgccccgaggacgggcacugcuccuggccgcucugaggacuaguuauaagacugacuagcccgaugggccucccaacgggcccuccuccccuccuugcaccgagauuaauaaaaaaaaaaaaaaaaaaaaaaaaaaaaaaaaaaaaaaaaaaaaaaaaaaaaaaaaaaaaaaaaugcaucccccccccccccccccccccccccccccccaaaggcucuuuucagagccaccagaauu

SEQ ID NO: 156 - RNA, 667 nt, Artificial Sequence
  PDCD1(1-149) mRNA product opt1
gggagaaagcuuaccaugcagaucccccaggccccguggcccguggucugggccgugcugcagcucggcuggcgccccgggugguuccuggacagccccgaccggccguggaacccgcccaccuucucccccgcgcugcucguggucaccgagggcgacaacgccacguucacgugcagcuucuccaacaccagcgaguccuucgugcugaacugguaccgcaugagccccuccaaccagaccgacaagcuggccgccuuccccgaggaccggagccagcccgggcaggacugccgcuuccgggugacccagcuccccaacggccgcgacuuccacauguccgucgugcgggcccgccggaacgacagcgggaccuaccugugcggcgcgaucucccuggccccgaaggcccagaucaaggagagccuccgcgccgagcugcgggugaccgagcgccgggcgugaggacuaguuauaagacugacuagcccgaugggccucccaacgggcccuccuccccuccuugcaccgagauuaauaaaaaaaaaaaaaaaaaaaaaaaaaaaaaaaaaaaaaaaaaaaaaaaaaaaaaaaaaaaaaaaaugcaucccccccccccccccccccccccccccccccaaaggcucuuuucagagccaccagaauu

SEQ ID NO: 157 - RNA, 877 nt, Artificial Sequence
  IL12A mRNA product opt1
gggagaaagcuuaccaugugccccgcccgcagccugcuccugguggccacccugguccuccuggaccaccugucccucgcgcggaaccugccgguggccacccccgaccccggcauguuccccugccugcaccacagccagaaccuccugcgcgccguguccaacaugcugcagaaggcccggcagacgcucgaguucuacccgugcaccagcgaggagaucgaccacgaggacaucaccaaggacaagaccuccacggucgaggccugccugccccuggagcucaccaagaacgagagcugccugaacucccgcgagaccagcuucaucaccaacggguccugccuggcgagccggaagacguccuucaugauggcccucugccugagcuccaucuacgaggaccugaagauguaccagguggaguucaagaccaugaacgccaagcuccugauggaccccaagcgccagaucuuccuggaccagaacaugcucgccgugaucgacgagcugaugcaggcgcugaacuucaacagcgagaccgucccccagaaguccagccucgaggagccggacuucuacaagaccaagaucaagcugugcauccugcuccacgccuuccggauccgcgccgugacgaucgaccgggugauguccuaccugaacgccagcugaggacuaguuauaagacugacuagcccgaugggccucccaacgggcccuccuccccuccuugcaccgagauuaauaaaaaaaaaaaaaaaaaaaaaaaaaaaaaaaaaaaaaaaaaaaaaaaaaaaaaaaaaaaaaaaaugcaucccccccccccccccccccccccccccccccaaaggcucuuuucagagccaccagaauu

SEQ ID NO: 158 - RNA, 874 nt, Artificial Sequence
  IL12A(1-219) mRNA product opt1
gggagaaagcuuaccaugugccccgcccgcagccugcuccugguggccacccugguccuccuggaccaccugucccucgcgcggaaccugccgguggccacccccgaccccggcauguuccccugccugcaccacagccagaaccuccugcgcgccguguccaacaugcugcagaaggcccggcagacgcucgaguucuacccgugcaccagcgaggagaucgaccacgaggacaucaccaaggacaagaccuccacggucgaggccugccugccccuggagcucaccaagaacgagagcugccugaacucccgcgagaccagcuucaucaccaacggguccugccuggcgagccggaagacguccuucaugauggcccucugccugagcuccaucuacgaggaccugaagauguaccagguggaguucaagaccaugaacgccaagcuccugauggaccccaagcgccagaucuuccuggaccagaacaugcucgccgugaucgacgagcugaugcaggcgcugaacuucaacagcgagaccgucccccagaaguccagccucgaggagccggacuucuacaagaccaagaucaagcugugcauccugcuccacgccuuccggauccgcgccgugacgaucgaccgggugauguccuaccugaacgccagcggacuaguuauaagacugacuagcccgaugggccucccaacgggcccuccuccccuccuugcaccgagauuaauaaaaaaaaaaaaaaaaaaaaaaaaaaaaaaaaaaaaaaaaaaaaaaaaaaaaaaaaaaaaaaaaugcaucccccccccccccccccccccccccccccccaaaggcucuuuucagagccaccagaauu

SEQ ID NO: 159 - RNA, 811 nt, Artificial Sequence
  IL12A(23-219) mRNA product opt1
gggagaaagcuuacccggaaccugccgguggccacccccgaccccggcauguuccccugccugcaccacagccagaaccuccugcgcgccguguccaacaugcugcagaaggcccggcagacgcucgaguucuacccgugcaccagcgaggagaucgaccacgaggacaucaccaaggacaagaccuccacggucgaggccugccugccccuggagcucaccaagaacgagagcugccugaacucccgcgagaccagcuucaucaccaacggguccugccuggcgagccggaagacguccuucaugauggcccucugccugagcuccaucuacgaggaccugaagauguaccagguggaguucaagaccaugaacgccaagcuccugauggaccccaagcgccagaucuuccuggaccagaacaugcucgccgugaucgacgagcugaugcaggcgcugaacuucaacagcgagaccgucccccagaaguccagccucgaggagccggacuucuacaagaccaagaucaagcugugcauccugcuccacgccuuccggauccgcgccgugacgaucgaccgggugauguccuaccugaacgccagcugaggacuaguuauaagacugacuagcccgaugggccucccaacgggcccuccuccccuccuugcaccgagauuaauaaaaaaaaaaaaaaaaaaaaaaaaaaaaaaaaaaaaaaaaaaaaaaaaaaaaaaaaaaaaaaaaugcaucccccccccccccccccccccccccccccccaaaggcucuuuucagagccaccagaauu

SEQ ID NO: 160 - RNA, 1204 nt, Artificial Sequence
  IL12B mRNA product opt1
gggagaaagcuuaccaugugccaccagcagcuggugaucagcugguucucccucgucuuccuggccagcccccugguggccaucugggagcucaagaaggacguguacgucguggagcuggacugguacccggacgcgcccggcgagauggugguccugaccugcgacacccccgaggaggacgggaucacguggacccucgaccaguccagcgaggugcugggcuccgggaagacccugaccauccaggugaaggaguucggcgacgccgggcaguacacgugccacaagggcggcgagguccucagccacucccugcugcuccugcacaagaaggaggacgggaucuggagcaccgacauccugaaggaccagaaggagcccaagaacaagaccuuccuccgcugcgaggccaagaacuacuccggccgguucacgugcugguggcugaccaccaucagcaccgaccugaccuucuccgucaagagcucccgcgggagcuccgacccgcagggcgugacgugcggggccgccacccucagcgcggagcgggugcgcggcgacaacaaggaguacgaguacuccguggagugccaggaggacagcgccugccccgccgccgaggagucccugcccaucgaggugauggucgacgcggugcacaagcugaaguacgagaacuacaccagcagcuucuucauccgggacaucaucaagcccgacccgcccaagaaccuccagcugaagccccugaagaacucccgccagguggaggucagcugggaguaccccgacaccugguccacgccgcacagcuacuucucccucaccuucugcguccaggugcagggcaagagcaagcgggagaagaaggaccgcguguucaccgacaagaccuccgccacggugaucugccggaagaacgccagcaucuccgugcgcgcccaggaccgguacuacagcuccagcugguccgagugggccagcguccccugcuccugaggacuaguuauaagacugacuagcccgaugggccucccaacgggcccuccuccccuccuugcaccgagauuaauaaaaaaaaaaaaaaaaaaaaaaaaaaaaaaaaaaaaaaaaaaaaaaaaaaaaaaaaaaaaaaaaugcaucccccccccccccccccccccccccccccccaaaggcucuuuucagagccaccagaauu

SEQ ID NO: 161 - RNA, 1201 nt, Artificial Sequence
  IL12B(1-328) mRNA product opt1
gggagaaagcuuaccaugugccaccagcagcuggugaucagcugguucucccucgucuuccuggccagcccccugguggccaucugggagcucaagaaggacguguacgucguggagcuggacugguacccggacgcgcccggcgagauggugguccugaccugcgacacccccgaggaggacgggaucacguggacccucgaccaguccagcgaggugcugggcuccgggaagacccugaccauccaggugaaggaguucggcgacgccgggcaguacacgugccacaagggcggcgagguccucagccacucccugcugcuccugcacaagaaggaggacgggaucuggagcaccgacauccugaaggaccagaaggagcccaagaacaagaccuuccuccgcugcgaggccaagaacuacuccggccgguucacgugcugguggcugaccaccaucagcaccgaccugaccuucuccgucaagagcucccgcgggagcuccgacccgcagggcgugacgugcggggccgccacccucagcgcggagcgggugcgcggcgacaacaaggaguacgaguacuccguggagugccaggaggacagcgccugccccgccgccgaggagucccugcccaucgaggugauggucgacgcggugcacaagcugaaguacgagaacuacaccagcagcuucuucauccgggacaucaucaagcccgacccgcccaagaaccuccagcugaagccccugaagaacucccgccagguggaggucagcugggaguaccccgacaccugguccacgccgcacagcuacuucucccucaccuucugcguccaggugcagggcaagagcaagcgggagaagaaggaccgcguguucaccgacaagaccuccgccacggugaucugccggaagaacgccagcaucuccgugcgcgcccaggaccgguacuacagcuccagcugguccgagugggccagcguccccugcuccggacuaguuauaagacugacuagcccgaugggccucccaacgggcccuccuccccuccuugcaccgagauuaauaaaaaaaaaaaaaaaaaaaaaaaaaaaaaaaaaaaaaaaaaaaaaaaaaaaaaaaaaaaaaaaaugcaucccccccccccccccccccccccccccccccaaaggcucuuuucagagccaccagaauu

SEQ ID NO: 162 - RNA, 1138 nt, Artificial Sequence
  IL12B(23-328) mRNA product opt1
gggagaaagcuuaccaucugggagcucaagaaggacguguacgucguggagcuggacugguacccggacgcgcccggcgagauggugguccugaccugcgacacccccgaggaggacgggaucacguggacccucgaccaguccagcgaggugcugggcuccgggaagacccugaccauccaggugaaggaguucggcgacgccgggcaguacacgugccacaagggcggcgagguccucagccacucccugcugcuccugcacaagaaggaggacgggaucuggagcaccgacauccugaaggaccagaaggagcccaagaacaagaccuuccuccgcugcgaggccaagaacuacuccggccgguucacgugcugguggcugaccaccaucagcaccgaccugaccuucuccgucaagagcucccgcgggagcuccgacccgcagggcgugacgugcggggccgccacccucagcgcggagcgggugcgcggcgacaacaaggaguacgaguacuccguggagugccaggaggacagcgccugccccgccgccgaggagucccugcccaucgaggugauggucgacgcggugcacaagcugaaguacgagaacuacaccagcagcuucuucauccgggacaucaucaagcccgacccgcccaagaaccuccagcugaagccccugaagaacucccgccagguggaggucagcugggaguaccccgacaccugguccacgccgcacagcuacuucucccucaccuucugcguccaggugcagggcaagagcaagcgggagaagaaggaccgcguguucaccgacaagaccuccgccacggugaucugccggaagaacgccagcaucuccgugcgcgcccaggaccgguacuacagcuccagcugguccgagugggccagcguccccugcuccugaggacuaguuauaagacugacuagcccgaugggccucccaacgggcccuccuccccuccuugcaccgagauuaauaaaaaaaaaaaaaaaaaaaaaaaaaaaaaaaaaaaaaaaaaaaaaaaaaaaaaaaaaaaaaaaaugcaucccccccccccccccccccccccccccccccaaaggcucuuuucagagccaccagaauu

SEQ ID NO: 163 - RNA, 271 nt, Artificial Sequence
  Linker-sFvCC49-218 mRNA product opt1
gggagaaagcuuaccggcagcaccuccgggagcggcaagcccggguccggcgaggggagcaccaagggcggacuaguuauaagacugacuagcccgaugggccucccaacgggcccuccuccccuccuugcaccgagauuaauaaaaaaaaaaaaaaaaaaaaaaaaaaaaaaaaaaaaaaaaaaaaaaaaaaaaaaaaaaaaaaaaugcaucccccccccccccccccccccccccccccccaaaggcucuuuucagagccaccagaauu

SEQ ID NO: 164 - RNA, 1849 nt, Artificial Sequence
  IL12 mRNA product opt1
gggagaaagcuuaccaugugccaccagcagcuggugaucagcugguucucccucgucuuccuggccagcccccugguggccaucugggagcucaagaaggacguguacgucguggagcuggacugguacccggacgcgcccggcgagauggugguccugaccugcgacacccccgaggaggacgggaucacguggacccucgaccaguccagcgaggugcugggcuccgggaagacccugaccauccaggugaaggaguucggcgacgccgggcaguacacgugccacaagggcggcgagguccucagccacucccugcugcuccugcacaagaaggaggacgggaucuggagcaccgacauccugaaggaccagaaggagcccaagaacaagaccuuccuccgcugcgaggccaagaacuacuccggccgguucacgugcugguggcugaccaccaucagcaccgaccugaccuucuccgucaagagcucccgcgggagcuccgacccgcagggcgugacgugcggggccgccacccucagcgcggagcgggugcgcggcgacaacaaggaguacgaguacuccguggagugccaggaggacagcgccugccccgccgccgaggagucccugcccaucgaggugauggucgacgcggugcacaagcugaaguacgagaacuacaccagcagcuucuucauccgggacaucaucaagcccgacccgcccaagaaccuccagcugaagccccugaagaacucccgccagguggaggucagcugggaguaccccgacaccugguccacgccgcacagcuacuucucccucaccuucugcguccaggugcagggcaagagcaagcgggagaagaaggaccgcguguucaccgacaagaccuccgccacggugaucugccggaagaacgccagcaucuccgugcgcgcccaggaccgguacuacagcuccagcugguccgagugggccagcguccccugcuccggcagcaccuccgggagcggcaagcccggguccggcgaggggagcaccaagggccggaaccugccgguggccacccccgaccccggcauguuccccugccugcaccacagccagaaccuccugcgcgccguguccaacaugcugcagaaggcccggcagacgcucgaguucuacccgugcaccagcgaggagaucgaccacgaggacaucaccaaggacaagaccuccacggucgaggccugccugccccuggagcucaccaagaacgagagcugccugaacucccgcgagaccagcuucaucaccaacggguccugccuggcgagccggaagacguccuucaugauggcccucugccugagcuccaucuacgaggaccugaagauguaccagguggaguucaagaccaugaacgccaagcuccugauggaccccaagcgccagaucuuccuggaccagaacaugcucgccgugaucgacgagcugaugcaggcgcugaacuucaacagcgagaccgucccccagaaguccagccucgaggagccggacuucuacaagaccaagaucaagcugugcauccugcuccacgccuuccggauccgcgccgugacgaucgaccgggugauguccuaccugaacgccagcugaggacuaguuauaagacugacuagcccgaugggccucccaacgggcccuccuccccuccuugcaccgagauuaauaaaaaaaaaaaaaaaaaaaaaaaaaaaaaaaaaaaaaaaaaaaaaaaaaaaaaaaaaaaaaaaaugcaucccccccccccccccccccccccccccccccaaaggcucuuuucagagccaccagaauu

SEQ ID NO: 165 - RNA, 1003 nt, Artificial Sequence
  CD40LG mRNA product opt1
gggagaaagcuuaccaugaucgagaccuacaaccagaccagcccccgcuccgccgccacgggccugccgaucagcaugaagaucuucauguaccuccugaccguguuccugaucacccagaugaucggguccgcgcuguucgccgucuaccugcaccggcgccuggacaagaucgaggacgagcggaaccuccacgaggacuucguguucaugaagaccauccagcgcugcaacacgggcgagcggagccugucccugcucaacugcgaggagaucaagagccaguucgagggguucgugaaggacaucaugcugaacaaggaggagaccaagaaggagaacuccuucgagaugcagaagggcgaccagaacccccagaucgccgcccacgucaucagcgaggccuccagcaagaccaccuccgugcugcagugggcggagaagggguacuacacgaugagcaacaaccucgugacccuggagaacggcaagcagcugaccgucaagcgccagggccucuacuacaucuacgcccaggugaccuucugcuccaaccgggaggccagcucccaggcccccuucaucgcgagccugugccugaagucccccgggcgcuucgagcggauccuccugcgcgccgccaacacgcacagcuccgccaagccgugcggccagcagagcauccaccucgggggcguguucgagcuccagcccggggccagcgucuucgugaacgugaccgaccccucccaggucagccacggcaccggcuucaccuccuucgggcugcugaagcucugaggacuaguuauaagacugacuagcccgaugggccucccaacgggcccuccuccccuccuugcaccgagauuaauaaaaaaaaaaaaaaaaaaaaaaaaaaaaaaaaaaaaaaaaaaaaaaaaaaaaaaaaaaaaaaaaugcaucccccccccccccccccccccccccccccccaaaggcucuuuucagagccaccagaauu

SEQ ID NO: 166 - RNA, 1084 nt, Artificial Sequence
  PDCD1 mRNA product opt2
gggagaaagcuuaccaugcagaucccccaggcccccuggcccgucgucugggccguccuccagcucggcuggcgccccggcugguuccucgacucccccgaccgccccuggaacccccccaccuucucccccgcccuccucgucgucaccgagggcgacaacgccaccuucaccuguuccuucuccaacaccuccgaguccuucguccucaacugguaccgcaugucccccuccaaccagaccgacaagcucgccgccuuccccgaggaccgcucccagcccggccaggacugccgcuuccgcgucacccagcuccccaacggccgcgacuuccacauguccgucguccgcgcccgccgcaacgacuccggcaccuaccucugcggcgccaucucccucgcccccaaggcccagaucaaggagucccuccgcgccgagcuccgcgucaccgagcgccgcgccgagguccccaccgcccaccccucccccuccccccgccccgccggccaguuccagacccucgucgucggcgucgucggcggccuccucggcucccucguccuccucgucuggguccucgccgucaucugcucccgcgccgcccgcggcaccaucggcgcccgccgcaccggccagccccucaaggaggaccccuccgccguccccgucuucuccgucgacuacggcgagcucgacuuccaguggcgcgagaagacccccgagccccccguccccugcguccccgagcagaccgaguacgccaccaucgucuuccccuccggcaugggcaccuccucccccgcccgccgcggcuccgccgacggcccccgcuccgcccagccccuccgccccgaggacggccacugcuccuggccccucugaggacuaguuauaagacugacuagcccgaugggccucccaacgggcccuccuccccuccuugcaccgagauuaauaaaaaaaaaaaaaaaaaaaaaaaaaaaaaaaaaaaaaaaaaaaaaaaaaaaaaaaaaaaaaaaaugcaucccccccccccccccccccccccccccccccaaaggcucuuuucagagccaccagaauu

SEQ ID NO: 167 - RNA, 667 nt, Artificial Sequence
  PDCD1(1-149) mRNA product opt2
gggagaaagcuuaccaugcagaucccccaggcccccuggcccgucgucugggccguccuccagcucggcuggcgccccggcugguuccucgacucccccgaccgccccuggaacccccccaccuucucccccgcccuccucgucgucaccgagggcgacaacgccaccuucaccuguuccuucuccaacaccuccgaguccuucguccucaacugguaccgcaugucccccuccaaccagaccgacaagcucgccgccuuccccgaggaccgcucccagcccggccaggacugccgcuuccgcgucacccagcuccccaacggccgcgacuuccacauguccgucguccgcgcccgccgcaacgacuccggcaccuaccucugcggcgccaucucccucgcccccaaggcccagaucaaggagucccuccgcgccgagcuccgcgucaccgagcgccgcgccugaggacuaguuauaagacugacuagcccgaugggccucccaacgggcccuccuccccuccuugcaccgagauuaauaaaaaaaaaaaaaaaaaaaaaaaaaaaaaaaaaaaaaaaaaaaaaaaaaaaaaaaaaaaaaaaaugcaucccccccccccccccccccccccccccccccaaaggcucuuuucagagccaccagaauu

SEQ ID NO: 168 - RNA, 877 nt, Artificial Sequence
  IL12A mRNA product opt2
gggagaaagcuuaccaugugccccgcccgcucccuccuccucgucgccacccucguccuccucgaccaccucucccucgcccgcaaccuccccgucgccacccccgaccccggcauguuccccugccuccaccacucccagaaccuccuccgcgccgucuccaacaugcuccagaaggcccgccagacccucgaguucuaccccugcaccuccgaggagaucgaccacgaggacaucaccaaggacaagaccuccaccgucgaggccugccucccccucgagcucaccaagaacgaguccugccucaacucccgcgagaccuccuucaucaccaacggcuccugccucgccucccgcaagaccuccuucaugauggcccucugccucuccuccaucuacgaggaccucaagauguaccaggucgaguucaagaccaugaacgccaagcuccucauggaccccaagcgccagaucuuccucgaccagaacaugcucgccgucaucgacgagcucaugcaggcccucaacuucaacuccgagaccgucccccagaaguccucccucgaggagcccgacuucuacaagaccaagaucaagcucugcauccuccuccacgccuuccgcauccgcgccgucaccaucgaccgcgucauguccuaccucaacgccuccugaggacuaguuauaagacugacuagcccgaugggccucccaacgggcccuccuccccuccuugcaccgagauuaauaaaaaaaaaaaaaaaaaaaaaaaaaaaaaaaaaaaaaaaaaaaaaaaaaaaaaaaaaaaaaaaaugcaucccccccccccccccccccccccccccccccaaaggcucuuuucagagccaccagaauu

SEQ ID NO: 169 - RNA, 874 nt, Artificial Sequence
  IL12A(1-219) mRNA product opt2
gggagaaagcuuaccaugugccccgcccgcucccuccuccucgucgccacccucguccuccucgaccaccucucccucgcccgcaaccuccccgucgccacccccgaccccggcauguuccccugccuccaccacucccagaaccuccuccgcgccgucuccaacaugcuccagaaggcccgccagacccucgaguucuaccccugcaccuccgaggagaucgaccacgaggacaucaccaaggacaagaccuccaccgucgaggccugccucccccucgagcucaccaagaacgaguccugccucaacucccgcgagaccuccuucaucaccaacggcuccugccucgccucccgcaagaccuccuucaugauggcccucugccucuccuccaucuacgaggaccucaagauguaccaggucgaguucaagaccaugaacgccaagcuccucauggaccccaagcgccagaucuuccucgaccagaacaugcucgccgucaucgacgagcucaugcaggcccucaacuucaacuccgagaccgucccccagaaguccucccucgaggagcccgacuucuacaagaccaagaucaagcucugcauccuccuccacgccuuccgcauccgcgccgucaccaucgaccgcgucauguccuaccucaacgccuccggacuaguuauaagacugacuagcccgaugggccucccaacgggcccuccuccccuccuugcaccgagauuaauaaaaaaaaaaaaaaaaaaaaaaaaaaaaaaaaaaaaaaaaaaaaaaaaaaaaaaaaaaaaaaaaugcaucccccccccccccccccccccccccccccccaaaggcucuuuucagagccaccagaauu

SEQ ID NO: 170 - RNA, 811 nt, Artificial Sequence
  IL12A(23-219) mRNA product opt2
gggagaaagcuuacccgcaaccuccccgucgccacccccgaccccggcauguuccccugccuccaccacucccagaaccuccuccgcgccgucuccaacaugcuccagaaggcccgccagacccucgaguucuaccccugcaccuccgaggagaucgaccacgaggacaucaccaaggacaagaccuccaccgucgaggccugccucccccucgagcucaccaagaacgaguccugccucaacucccgcgagaccuccuucaucaccaacggcuccugccucgccucccgcaagaccuccuucaugauggcccucugccucuccuccaucuacgaggaccucaagauguaccaggucgaguucaagaccaugaacgccaagcuccucauggaccccaagcgccagaucuuccucgaccagaacaugcucgccgucaucgacgagcucaugcaggcccucaacuucaacuccgagaccgucccccagaaguccucccucgaggagcccgacuucuacaagaccaagaucaagcucugcauccuccuccacgccuuccgcauccgcgccgucaccaucgaccgcgucauguccuaccucaacgccuccugaggacuaguuauaagacugacuagcccgaugggccucccaacgggcccuccuccccuccuugcaccgagauuaauaaaaaaaaaaaaaaaaaaaaaaaaaaaaaaaaaaaaaaaaaaaaaaaaaaaaaaaaaaaaaaaaugcaucccccccccccccccccccccccccccccccaaaggcucuuuucagagccaccagaauu

SEQ ID NO: 171 - RNA, 1204 nt, Artificial Sequence
  IL12B mRNA product opt2
gggagaaagcuuaccaugugccaccagcagcucgucaucuccugguucucccucgucuuccucgccuccccccucgucgccaucugggagcucaagaaggacgucuacgucgucgagcucgacugguaccccgacgcccccggcgagauggucguccucaccugugacacccccgaggaggacggcaucaccuggacccucgaccaguccuccgagguccucggcuccggcaagacccucaccauccaggucaaggaguucggcgacgccggccaguacaccugucacaagggcggcgagguccucucccacucccuccuccuccuccacaagaaggaggacggcaucugguccaccgacauccucaaggaccagaaggagcccaagaacaagaccuuccuccgcugcgaggccaagaacuacuccggccgcuucaccuguugguggcucaccaccaucuccaccgaccucaccuucuccgucaaguccucccgcggcuccuccgacccccagggcgucaccuguggcgccgccacccucuccgccgagcgcguccgcggcgacaacaaggaguacgaguacuccgucgagugccaggaggacuccgccugccccgccgccgaggagucccuccccaucgaggucauggucgacgccguccacaagcucaaguacgagaacuacaccuccuccuucuucauccgcgacaucaucaagcccgacccccccaagaaccuccagcucaagccccucaagaacucccgccaggucgaggucuccugggaguaccccgacaccugguccaccccccacuccuacuucucccucaccuucugcguccagguccagggcaaguccaagcgcgagaagaaggaccgcgucuucaccgacaagaccuccgccaccgucaucugccgcaagaacgccuccaucuccguccgcgcccaggaccgcuacuacuccuccuccugguccgagugggccuccguccccugcuccugaggacuaguuauaagacugacuagcccgaugggccucccaacgggcccuccuccccuccuugcaccgagauuaauaaaaaaaaaaaaaaaaaaaaaaaaaaaaaaaaaaaaaaaaaaaaaaaaaaaaaaaaaaaaaaaaugcaucccccccccccccccccccccccccccccccaaaggcucuuuucagagccaccagaauu

SEQ ID NO: 172 - RNA, 1201 nt, Artificial Sequence
  IL12B(1-328) mRNA product opt2
gggagaaagcuuaccaugugccaccagcagcucgucaucuccugguucucccucgucuuccucgccuccccccucgucgccaucugggagcucaagaaggacgucuacgucgucgagcucgacugguaccccgacgcccccggcgagauggucguccucaccugugacacccccgaggaggacggcaucaccuggacccucgaccaguccuccgagguccucggcuccggcaagacccucaccauccaggucaaggaguucggcgacgccggccaguacaccugucacaagggcggcgagguccucucccacucccuccuccuccuccacaagaaggaggacggcaucugguccaccgacauccucaaggaccagaaggagcccaagaacaagaccuuccuccgcugcgaggccaagaacuacuccggccgcuucaccuguugguggcucaccaccaucuccaccgaccucaccuucuccgucaaguccucccgcggcuccuccgacccccagggcgucaccuguggcgccgccacccucuccgccgagcgcguccgcggcgacaacaaggaguacgaguacuccgucgagugccaggaggacuccgccugccccgccgccgaggagucccuccccaucgaggucauggucgacgccguccacaagcucaaguacgagaacuacaccuccuccuucuucauccgcgacaucaucaagcccgacccccccaagaaccuccagcucaagccccucaagaacucccgccaggucgaggucuccugggaguaccccgacaccugguccaccccccacuccuacuucucccucaccuucugcguccagguccagggcaaguccaagcgcgagaagaaggaccgcgucuucaccgacaagaccuccgccaccgucaucugccgcaagaacgccuccaucuccguccgcgcccaggaccgcuacuacuccuccuccugguccgagugggccuccguccccugcuccggacuaguuauaagacugacuagcccgaugggccucccaacgggcccuccuccccuccuugcaccgagauuaauaaaaaaaaaaaaaaaaaaaaaaaaaaaaaaaaaaaaaaaaaaaaaaaaaaaaaaaaaaaaaaaaugcaucccccccccccccccccccccccccccccccaaaggcucuuuucagagccaccagaauu

SEQ ID NO: 173 - RNA, 1138 nt, Artificial Sequence
  IL12B(23-328) mRNA product opt2
gggagaaagcuuaccaucugggagcucaagaaggacgucuacgucgucgagcucgacugguaccccgacgcccccggcgagauggucguccucaccugugacacccccgaggaggacggcaucaccuggacccucgaccaguccuccgagguccucggcuccggcaagacccucaccauccaggucaaggaguucggcgacgccggccaguacaccugucacaagggcggcgagguccucucccacucccuccuccuccuccacaagaaggaggacggcaucugguccaccgacauccucaaggaccagaaggagcccaagaacaagaccuuccuccgcugcgaggccaagaacuacuccggccgcuucaccuguugguggcucaccaccaucuccaccgaccucaccuucuccgucaaguccucccgcggcuccuccgacccccagggcgucaccuguggcgccgccacccucuccgccgagcgcguccgcggcgacaacaaggaguacgaguacuccgucgagugccaggaggacuccgccugccccgccgccgaggagucccuccccaucgaggucauggucgacgccguccacaagcucaaguacgagaacuacaccuccuccuucuucauccgcgacaucaucaagcccgacccccccaagaaccuccagcucaagccccucaagaacucccgccaggucgaggucuccugggaguaccccgacaccugguccaccccccacuccuacuucucccucaccuucugcguccagguccagggcaaguccaagcgcgagaagaaggaccgcgucuucaccgacaagaccuccgccaccgucaucugccgcaagaacgccuccaucuccguccgcgcccaggaccgcuacuacuccuccuccugguccgagugggccuccguccccugcuccugaggacuaguuauaagacugacuagcccgaugggccucccaacgggcccuccuccccuccuugcaccgagauuaauaaaaaaaaaaaaaaaaaaaaaaaaaaaaaaaaaaaaaaaaaaaaaaaaaaaaaaaaaaaaaaaaugcaucccccccccccccccccccccccccccccccaaaggcucuuuucagagccaccagaauu

SEQ ID NO: 174 - RNA, 271 nt, Artificial Sequence
  Linker-sFvCC49-218 mRNA product opt2
gggagaaagcuuaccggcuccaccuccggcuccggcaagcccggcuccggcgagggcuccaccaagggcggacuaguuauaagacugacuagcccgaugggccucccaacgggcccuccuccccuccuugcaccgagauuaauaaaaaaaaaaaaaaaaaaaaaaaaaaaaaaaaaaaaaaaaaaaaaaaaaaaaaaaaaaaaaaaaugcaucccccccccccccccccccccccccccccccaaaggcucuuuucagagccaccagaauu

SEQ ID NO: 175 - RNA, 1849 nt, Artificial Sequence
  IL12 mRNA product opt2
gggagaaagcuuaccaugugccaccagcagcucgucaucuccugguucucccucgucuuccucgccuccccccucgucgccaucugggagcucaagaaggacgucuacgucgucgagcucgacugguaccccgacgcccccggcgagauggucguccucaccugugacacccccgaggaggacggcaucaccuggacccucgaccaguccuccgagguccucggcuccggcaagacccucaccauccaggucaaggaguucggcgacgccggccaguacaccugucacaagggcggcgagguccucucccacucccuccuccuccuccacaagaaggaggacggcaucugguccaccgacauccucaaggaccagaaggagcccaagaacaagaccuuccuccgcugcgaggccaagaacuacuccggccgcuucaccuguugguggcucaccaccaucuccaccgaccucaccuucuccgucaaguccucccgcggcuccuccgacccccagggcgucaccuguggcgccgccacccucuccgccgagcgcguccgcggcgacaacaaggaguacgaguacuccgucgagugccaggaggacuccgccugccccgccgccgaggagucccuccccaucgaggucauggucgacgccguccacaagcucaaguacgagaacuacaccuccuccuucuucauccgcgacaucaucaagcccgacccccccaagaaccuccagcucaagccccucaagaacucccgccaggucgaggucuccugggaguaccccgacaccugguccaccccccacuccuacuucucccucaccuucugcguccagguccagggcaaguccaagcgcgagaagaaggaccgcgucuucaccgacaagaccuccgccaccgucaucugccgcaagaacgccuccaucuccguccgcgcccaggaccgcuacuacuccuccuccugguccgagugggccuccguccccugcuccggcuccaccuccggcuccggcaagcccggcuccggcgagggcuccaccaagggccgcaaccuccccgucgccacccccgaccccggcauguuccccugccuccaccacucccagaaccuccuccgcgccgucuccaacaugcuccagaaggcccgccagacccucgaguucuaccccugcaccuccgaggagaucgaccacgaggacaucaccaaggacaagaccuccaccgucgaggccugccucccccucgagcucaccaagaacgaguccugccucaacucccgcgagaccuccuucaucaccaacggcuccugccucgccucccgcaagaccuccuucaugauggcccucugccucuccuccaucuacgaggaccucaagauguaccaggucgaguucaagaccaugaacgccaagcuccucauggaccccaagcgccagaucuuccucgaccagaacaugcucgccgucaucgacgagcucaugcaggcccucaacuucaacuccgagaccgucccccagaaguccucccucgaggagcccgacuucuacaagaccaagaucaagcucugcauccuccuccacgccuuccgcauccgcgccgucaccaucgaccgcgucauguccuaccucaacgccuccugaggacuaguuauaagacugacuagcccgaugggccucccaacgggcccuccuccccuccuugcaccgagauuaauaaaaaaaaaaaaaaaaaaaaaaaaaaaaaaaaaaaaaaaaaaaaaaaaaaaaaaaaaaaaaaaaugcaucccccccccccccccccccccccccccccccaaaggcucuuuucagagccaccagaauu

SEQ ID NO: 176 - RNA, 1003 nt, Artificial Sequence
  CD40LG mRNA product opt2
gggagaaagcuuaccaugaucgagaccuacaaccagaccuccccccgcuccgccgccaccggccuccccaucuccaugaagaucuucauguaccuccucaccgucuuccucaucacccagaugaucggcuccgcccucuucgccgucuaccuccaccgccgccucgacaagaucgaggacgagcgcaaccuccacgaggacuucgucuucaugaagaccauccagcgcugcaacaccggcgagcgcucccucucccuccucaacugcgaggagaucaagucccaguucgagggcuucgucaaggacaucaugcucaacaaggaggagaccaagaaggagaacuccuucgagaugcagaagggcgaccagaacccccagaucgccgcccacgucaucuccgaggccuccuccaagaccaccuccguccuccagugggccgagaagggcuacuacaccauguccaacaaccucgucacccucgagaacggcaagcagcucaccgucaagcgccagggccucuacuacaucuacgcccaggucaccuucugcuccaaccgcgaggccuccucccaggcccccuucaucgccucccucugccucaagucccccggccgcuucgagcgcauccuccuccgcgccgccaacacccacuccuccgccaagcccugcggccagcaguccauccaccucggcggcgucuucgagcuccagcccggcgccuccgucuucgucaacgucaccgaccccucccaggucucccacggcaccggcuucaccuccuucggccuccucaagcucugaggacuaguuauaagacugacuagcccgaugggccucccaacgggcccuccuccccuccuugcaccgagauuaauaaaaaaaaaaaaaaaaaaaaaaaaaaaaaaaaaaaaaaaaaaaaaaaaaaaaaaaaaaaaaaaaugcaucccccccccccccccccccccccccccccccaaaggcucuuuucagagccaccagaauu

SEQ ID NO: 177 - RNA, 1084 nt, Artificial Sequence
  PDCD1 mRNA product opt3
gggagaaagcuuaccaugcagaucccccaagccccuuggccaguggucugggcuguucugcagcucggcuggagaccggggugguuccuugacagccccgauaggccuuggaacccacccaccuuuuccccugcacuguuggugguaacagagggagacaaugccacuuucacgugcucuuuuucaaacaccagugagagcuucguguuaaauugguaccggauguccccaucuaaccagacagauaagcuggcggcuuuucccgaagaccgcucgcagccuggucaagauugucgauuccgugucacucagcuaccaaauggcagagacuuucacaugucagugguuagggcccggcgcaacgauagcgggaccuaucucugcggagcaauuagucuggccccgaaagcucagauaaaggaaucccuuagagcagagcugagggugacagaacggcgcgccgagguccccaccgcucauccuucuccaagcccccgaccugccggccaguuccaaacuuuggugguagguguugucgggggacuccugggcucccuggugcucuuagugugggugcuggcggucaucuguucaagagcagccaggggcacaauuggggcucggcguaccggacagccacuuaaagaggaccccagugccguuccgguguuuagcguagauuacggugaauuggacuuccaguggcgcgagaagacgccugaacccccagugccuugcguccccgagcagacugaguaugcaaccaucguguuuccaucuggcauggggacauccucacccgcuagaaggggaagcgccgauggcccucggagugcgcaaccacugcgaccggaagacggucacuguucuuggccccuaugaggacuaguuauaagacugacuagcccgaugggccucccaacgggcccuccuccccuccuugcaccgagauuaauaaaaaaaaaaaaaaaaaaaaaaaaaaaaaaaaaaaaaaaaaaaaaaaaaaaaaaaaaaaaaaaaugcaucccccccccccccccccccccccccccccccaaaggcucuuuucagagccaccagaauu

SEQ ID NO: 178 - RNA, 667 nt, Artificial Sequence
  PDCD1(1-149) mRNA product opt3
gggagaaagcuuaccaugcagaucccccaagccccuuggccaguggucugggcuguucugcagcucggcuggagaccggggugguuccuugacagccccgauaggccuuggaacccacccaccuuuuccccugcacuguuggugguaacagagggagacaaugccacuuucacgugcucuuuuucaaacaccagugagagcuucguguuaaauugguaccggauguccccaucuaaccagacagauaagcuggcggcuuuucccgaagaccgcucgcagccuggucaagauugucgauuccgugucacucagcuaccaaauggcagagacuuucacaugucagugguuagggcccggcgcaacgauagcgggaccuaucucugcggagcaauuagucuggccccgaaagcucagauaaaggaaucccuuagagcagagcugagggugacagaacggcgcgccugaggacuaguuauaagacugacuagcccgaugggccucccaacgggcccuccuccccuccuugcaccgagauuaauaaaaaaaaaaaaaaaaaaaaaaaaaaaaaaaaaaaaaaaaaaaaaaaaaaaaaaaaaaaaaaaaugcaucccccccccccccccccccccccccccccccaaaggcucuuuucagagccaccagaauu

SEQ ID NO: 179 - RNA, 877 nt, Artificial Sequence
  IL12A mRNA product opt3
gggagaaagcuuaccaugugccccgccagaagccugcuccuuguggcuacccuggucuuguuagaccaccugucccuagcaaggaaccucccuguugccacaccagauccgggcauguuccccugucugcaucacucucagaaucuucugcgggcggugucaaacauguugcaaaaggcucgccagacucucgaguuuuacccuugcacgagugaagagaucgaccaugaagauauuaccaaagacaagacaagcacuguagaggccugucugccacuggaacucaccaaaaaugaguccugcuuaaacucucgagagacaucguucauaaccaaugggucaugucuggcaagccguaagacaaguuuuaugauggcccuuugcuuguccucuaucuaugaagaucugaaaauguaccagguggaguucaagacuaugaacgcuaagcuacucauggaccccaaaagacagauuuuucuggaucaaaauaugcuugcagucaucgacgaacugaugcaggccuugaacuucaauagcgagaccgugccucagaaguccucacucgaggaaccagauuuuuauaaaacgaagauuaaacuguguaucuuacugcacgcuuucaggauacgggccguuacuaucgaccgcgugaugaguuaccucaacgcgagcugaggacuaguuauaagacugacuagcccgaugggccucccaacgggcccuccuccccuccuugcaccgagauuaauaaaaaaaaaaaaaaaaaaaaaaaaaaaaaaaaaaaaaaaaaaaaaaaaaaaaaaaaaaaaaaaaugcaucccccccccccccccccccccccccccccccaaaggcucuuuucagagccaccagaauu

SEQ ID NO: 180 - RNA, 874 nt, Artificial Sequence
  IL12A(1-219) mRNA product opt3
gggagaaagcuuaccaugugccccgccagaagccugcuccuuguggcuacccuggucuuguuagaccaccugucccuagcaaggaaccucccuguugccacaccagauccgggcauguuccccugucugcaucacucucagaaucuucugcgggcggugucaaacauguugcaaaaggcucgccagacucucgaguuuuacccuugcacgagugaagagaucgaccaugaagauauuaccaaagacaagacaagcacuguagaggccugucugccacuggaacucaccaaaaaugaguccugcuuaaacucucgagagacaucguucauaaccaaugggucaugucuggcaagccguaagacaaguuuuaugauggcccuuugcuuguccucuaucuaugaagaucugaaaauguaccagguggaguucaagacuaugaacgcuaagcuacucauggaccccaaaagacagauuuuucuggaucaaaauaugcuugcagucaucgacgaacugaugcaggccuugaacuucaauagcgagaccgugccucagaaguccucacucgaggaaccagauuuuuauaaaacgaagauuaaacuguguaucuuacugcacgcuuucaggauacgggccguuacuaucgaccgcgugaugaguuaccucaacgcgagcggacuaguuauaagacugacuagcccgaugggccucccaacgggcccuccuccccuccuugcaccgagauuaauaaaaaaaaaaaaaaaaaaaaaaaaaaaaaaaaaaaaaaaaaaaaaaaaaaaaaaaaaaaaaaaaugcaucccccccccccccccccccccccccccccccaaaggcucuuuucagagccaccagaauu

SEQ ID NO: 181 - RNA, 811 nt, Artificial Sequence
  IL12A(23-219) mRNA product opt3
gggagaaagcuuaccaggaaccucccuguugccacaccagauccgggcauguuccccugucugcaucacucucagaaucuucugcgggcggugucaaacauguugcaaaaggcucgccagacucucgaguuuuacccuugcacgagugaagagaucgaccaugaagauauuaccaaagacaagacaagcacuguagaggccugucugccacuggaacucaccaaaaaugaguccugcuuaaacucucgagagacaucguucauaaccaaugggucaugucuggcaagccguaagacaaguuuuaugauggcccuuugcuuguccucuaucuaugaagaucugaaaauguaccagguggaguucaagacuaugaacgcuaagcuacucauggaccccaaaagacagauuuuucuggaucaaaauaugcuugcagucaucgacgaacugaugcaggccuugaacuucaauagcgagaccgugccucagaaguccucacucgaggaaccagauuuuuauaaaacgaagauuaaacuguguaucuuacugcacgcuuucaggauacgggccguuacuaucgaccgcgugaugaguuaccucaacgcgagcugaggacuaguuauaagacugacuagcccgaugggccucccaacgggcccuccuccccuccuugcaccgagauuaauaaaaaaaaaaaaaaaaaaaaaaaaaaaaaaaaaaaaaaaaaaaaaaaaaaaaaaaaaaaaaaaaugcaucccccccccccccccccccccccccccccccaaaggcucuuuucagagccaccagaauu

SEQ ID NO: 182 - RNA, 1204 nt, Artificial Sequence
  IL12B mRNA product opt3
gggagaaagcuuaccaugugccaccagcaacuggugaucagcugguucucccucgucuuucuugccucuccccugguugcuauuugggaguugaagaaagacguguacguaguggaauuagauugguauccugacgcaccaggcgagauggucgugcugaccugugauacaccggaagaggacgggauaacuuggacgcuagaucagucaagugaaguucucggaagcgguaagacccugacaauccaggugaaagaguucggcgacgccgggcaguacacuugccauaagggaggcgagguccuuucccacucucuguugcuccugcauaaaaaggaagaugguauuuggucgaccgacauccugaaggaucaaaaagagcccaagaacaaaacauuucucagaugugaagcgaagaauuauucagggagguuuaccugcuggugguuaacuacaauuagcaccgaccugacguucagugugaaauccucucggggaagcuccgauccucagggcguaacuuguggcgcugccacccuuucagcagagcgcguucgaggggacaacaaggaguacgaauauaguguggagugccaggaagauagcgccuguccagcugcagaggaaucuuugcccaucgaggucaugguggacgccgugcacaagcugaaauacgagaauuauacauccucauucuuuauacgugacaucauuaagccugauccacccaaaaaccuacagcucaagccucugaaaaauagcagacaagucgaaguuaguugggaguacccagacacuuggucuaccccgcauuccuacuucagccuuacauuuugcgugcagguacagggaaagucgaaaagggaaaagaaggaucggguguucaccgacaaaacgucugcuacugucaucugucgcaagaacgccuccauuucagugagagcgcaggauagguauuacaguagcuccuggucugagugggcaagcguucccugcucaugaggacuaguuauaagacugacuagcccgaugggccucccaacgggcccuccuccccuccuugcaccgagauuaauaaaaaaaaaaaaaaaaaaaaaaaaaaaaaaaaaaaaaaaaaaaaaaaaaaaaaaaaaaaaaaaaugcaucccccccccccccccccccccccccccccccaaaggcucuuuucagagccaccagaauu

SEQ ID NO: 183 - RNA, 1201 nt, Artificial Sequence
  IL12B(1-328) mRNA product opt3
gggagaaagcuuaccaugugccaccagcaacuggugaucagcugguucucccucgucuuucuugccucuccccugguugcuauuugggaguugaagaaagacguguacguaguggaauuagauugguauccugacgcaccaggcgagauggucgugcugaccugugauacaccggaagaggacgggauaacuuggacgcuagaucagucaagugaaguucucggaagcgguaagacccugacaauccaggugaaagaguucggcgacgccgggcaguacacuugccauaagggaggcgagguccuuucccacucucuguugcuccugcauaaaaaggaagaugguauuuggucgaccgacauccugaaggaucaaaaagagcccaagaacaaaacauuucucagaugugaagcgaagaauuauucagggagguuuaccugcuggugguuaacuacaauuagcaccgaccugacguucagugugaaauccucucggggaagcuccgauccucagggcguaacuuguggcgcugccacccuuucagcagagcgcguucgaggggacaacaaggaguacgaauauaguguggagugccaggaagauagcgccuguccagcugcagaggaaucuuugcccaucgaggucaugguggacgccgugcacaagcugaaauacgagaauuauacauccucauucuuuauacgugacaucauuaagccugauccacccaaaaaccuacagcucaagccucugaaaaauagcagacaagucgaaguuaguugggaguacccagacacuuggucuaccccgcauuccuacuucagccuuacauuuugcgugcagguacagggaaagucgaaaagggaaaagaaggaucggguguucaccgacaaaacgucugcuacugucaucugucgcaagaacgccuccauuucagugagagcgcaggauagguauuacaguagcuccuggucugagugggcaagcguucccugcucaggacuaguuauaagacugacuagcccgaugggccucccaacgggcccuccuccccuccuugcaccgagauuaauaaaaaaaaaaaaaaaaaaaaaaaaaaaaaaaaaaaaaaaaaaaaaaaaaaaaaaaaaaaaaaaaugcaucccccccccccccccccccccccccccccccaaaggcucuuuucagagccaccagaauu

SEQ ID NO: 184 - RNA, 1138 nt, Artificial Sequence
  IL12B(23-328) mRNA product opt3
gggagaaagcuuaccauuugggaguugaagaaagacguguacguaguggaauuagauugguauccugacgcaccaggcgagauggucgugcugaccugugauacaccggaagaggacgggauaacuuggacgcuagaucagucaagugaaguucucggaagcgguaagacccugacaauccaggugaaagaguucggcgacgccgggcaguacacuugccauaagggaggcgagguccuuucccacucucuguugcuccugcauaaaaaggaagaugguauuuggucgaccgacauccugaaggaucaaaaagagcccaagaacaaaacauuucucagaugugaagcgaagaauuauucagggagguuuaccugcuggugguuaacuacaauuagcaccgaccugacguucagugugaaauccucucggggaagcuccgauccucagggcguaacuuguggcgcugccacccuuucagcagagcgcguucgaggggacaacaaggaguacgaauauaguguggagugccaggaagauagcgccuguccagcugcagaggaaucuuugcccaucgaggucaugguggacgccgugcacaagcugaaauacgagaauuauacauccucauucuuuauacgugacaucauuaagccugauccacccaaaaaccuacagcucaagccucugaaaaauagcagacaagucgaaguuaguugggaguacccagacacuuggucuaccccgcauuccuacuucagccuuacauuuugcgugcagguacagggaaagucgaaaagggaaaagaaggaucggguguucaccgacaaaacgucugcuacugucaucugucgcaagaacgccuccauuucagugagagcgcaggauagguauuacaguagcuccuggucugagugggcaagcguucccugcucaugaggacuaguuauaagacugacuagcccgaugggccucccaacgggcccuccuccccuccuugcaccgagauuaauaaaaaaaaaaaaaaaaaaaaaaaaaaaaaaaaaaaaaaaaaaaaaaaaaaaaaaaaaaaaaaaaugcaucccccccccccccccccccccccccccccccaaaggcucuuuucagagccaccagaauu

SEQ ID NO: 185 - RNA, 271 nt, Artificial Sequence
  Linker-sFvCC49-218 mRNA product opt3
gggagaaagcuuaccggcagcaccuccgggucuggaaagcccgguucaggcgaggggaguacaaaaggaggacuaguuauaagacugacuagcccgaugggccucccaacgggcccuccuccccuccuugcaccgagauuaauaaaaaaaaaaaaaaaaaaaaaaaaaaaaaaaaaaaaaaaaaaaaaaaaaaaaaaaaaaaaaaaaugcaucccccccccccccccccccccccccccccccaaaggcucuuuucagagccaccagaauu

SEQ ID NO: 186 - RNA, 1849 nt, Artificial Sequence
  IL12 mRNA product opt3
gggagaaagcuuaccaugugccaccagcaacuggugaucagcugguucucccucgucuuucuugccucuccccugguugcuauuugggaguugaagaaagacguguacguaguggaauuagauugguauccugacgcaccaggcgagauggucgugcugaccugugauacaccggaagaggacgggauaacuuggacgcuagaucagucaagugaaguucucggaagcgguaagacccugacaauccaggugaaagaguucggcgacgccgggcaguacacuugccauaagggaggcgagguccuuucccacucucuguugcuccugcauaaaaaggaagaugguauuuggucgaccgacauccugaaggaucaaaaagagcccaagaacaaaacauuucucagaugugaagcgaagaauuauucagggagguuuaccugcuggugguuaacuacaauuagcaccgaccugacguucagugugaaauccucucggggaagcuccgauccucagggcguaacuuguggcgcugccacccuuucagcagagcgcguucgaggggacaacaaggaguacgaauauaguguggagugccaggaagauagcgccuguccagcugcagaggaaucuuugcccaucgaggucaugguggacgccgugcacaagcugaaauacgagaauuauacauccucauucuuuauacgugacaucauuaagccugauccacccaaaaaccuacagcucaagccucugaaaaauagcagacaagucgaaguuaguugggaguacccagacacuuggucuaccccgcauuccuacuucagccuuacauuuugcgugcagguacagggaaagucgaaaagggaaaagaaggaucggguguucaccgacaaaacgucugcuacugucaucugucgcaagaacgccuccauuucagugagagcgcaggauagguauuacaguagcuccuggucugagugggcaagcguucccugcucaggcagcaccuccgggucuggaaagcccgguucaggcgaggggaguacaaaaggaaggaaccucccuguugccacaccagauccgggcauguuccccugucugcaucacucucagaaucuucugcgggcggugucaaacauguugcaaaaggcucgccagacucucgaguuuuacccuugcacgagugaagagaucgaccaugaagauauuaccaaagacaagacaagcacuguagaggccugucugccacuggaacucaccaaaaaugaguccugcuuaaacucucgagagacaucguucauaaccaaugggucaugucuggcaagccguaagacaaguuuuaugauggcccuuugcuuguccucuaucuaugaagaucugaaaauguaccagguggaguucaagacuaugaacgcuaagcuacucauggaccccaaaagacagauuuuucuggaucaaaauaugcuugcagucaucgacgaacugaugcaggccuugaacuucaauagcgagaccgugccucagaaguccucacucgaggaaccagauuuuuauaaaacgaagauuaaacuguguaucuuacugcacgcuuucaggauacgggccguuacuaucgaccgcgugaugaguuaccucaacgcgagcugaggacuaguuauaagacugacuagcccgaugggccucccaacgggcccuccuccccuccuugcaccgagauuaauaaaaaaaaaaaaaaaaaaaaaaaaaaaaaaaaaaaaaaaaaaaaaaaaaaaaaaaaaaaaaaaaugcaucccccccccccccccccccccccccccccccaaaggcucuuuucagagccaccagaauu

SEQ ID NO: 187 - RNA, 1003 nt, Artificial Sequence
  CD40LG mRNA product opt3
gggagaaagcuuaccaugaucgagaccuacaaccagacaagccccagauccgccgcuacuggccugccuauuucuaugaagauauucauguaucuccuuacgguguuucugaucacccaaaugauugggucagcauuguucgccgucuacuuacacaggcggcuggacaaaaucgaagaugagcgcaaucuacaugaagacuuuguuuucaugaagacaauucagcgaugcaacacuggagagcguagucucagccugcuuaauugugaagagaucaaaucccaguuugaggguuucgugaaggauauaaugcugaacaaagaagagaccaagaaggaaaauucuuuugagaugcagaaaggcgaccaaaacccacagaucgcggcucacguaauuucggaggccucaagcaagacaaccaguguguugcagugggcagaaaaaggguauuacacuauguccaauaaccucgucacacuggagaauggaaagcagcugaccgugaaaagacaaggccucuauuacaucuaugcccagguuacguucugcucuaacagggaagcuagcucccaggcaccguuuauugccucauuaugucugaagagucccggucgguucgagcgcauccuuuugagagcugccaauacucauagcucugcgaagccuugcgggcagcaauccauacaccugggaggcguguuugaacuacagccaggcgcaucagucuucgugaacguaaccgaucccagccagguuagucaugggacaggauuuacuucuuucggucuccugaaacuuugaggacuaguuauaagacugacuagcccgaugggccucccaacgggcccuccuccccuccuugcaccgagauuaauaaaaaaaaaaaaaaaaaaaaaaaaaaaaaaaaaaaaaaaaaaaaaaaaaaaaaaaaaaaaaaaaugcaucccccccccccccccccccccccccccccccaaaggcucuuuucagagccaccagaauu

SEQ ID NO: 188 - RNA, 1084 nt, Artificial Sequence
  PDCD1 mRNA product opt3v
gggagaaagcuuaccaugcagaucccucaggcuccuuggccuguugugugggcuguucugcaacuuggauggcggccuggcugguuccuggacucuccugacagacccuggaauccuccaacauucagccccgcucugcuggugguuaccgagggcgauaaugccaccuucaccuguagcuucagcaacaccagcgagagcuucgugcugaacugguacagaaugagccccagcaaccagaccgacaagcuggccgccuuuccugaggauagaucucagcccggccaggacugccgguucagaguuacacagcugcccaacggccgggacuuccacaugucugucguccgggccagaagaaacgacagcggcacauaucugugcggcgccauuucucuggccccuaaggcucagaucaaagagagccugagagccgagcugagagugacagaaagacgggccgaagugcccacagcucacccuucaccuucuccaagaccugccggccaguuccagacacuggucgugggaguuguuggcggacugcugggaucucuggugcugcuuguuugggugcucgccgugaucuguagcagagccgccagaggaacaaucggcgccagaaggacaggccagccucugaaagaggaucccucugcuguccccguguucagcguggacuauggcgagcuggauuuccaguggcgggaaaagacacccgagccuccagugccuugugugccugagcagacagaguacgccaccaucguguucccuagcggcaugggcacaucuagcccugccagaagaggaucugccgacggaccuagaucugcccagccucucagaccugaggauggccacuguagcuggccucuguaaggacuaguuauaagacugacuagcccgaugggccucccaacgggcccuccuccccuccuugcaccgagauuaauaaaaaaaaaaaaaaaaaaaaaaaaaaaaaaaaaaaaaaaaaaaaaaaaaaaaaaaaaaaaaaaaugcaucccccccccccccccccccccccccccccccaaaggcucuuuucagagccaccagaauu

SEQ ID NO: 189 - RNA, 667 nt, Artificial Sequence
  PDCD1(1-149) mRNA product opt3v
gggagaaagcuuaccaugcagaucccucaggcuccuuggccuguugugugggcuguucugcaacuuggauggcggccuggcugguuccuggacucuccugacagacccuggaauccuccaacauucagccccgcucugcuggugguuaccgagggcgauaaugccaccuucaccuguagcuucagcaacaccagcgagagcuucgugcugaacugguacagaaugagccccagcaaccagaccgacaagcuggccgccuuuccugaggauagaucucagcccggccaggacugccgguucagaguuacacagcugcccaacggccgggacuuccacaugucugucguccgggccagaagaaacgacagcggcacauaucugugcggcgccauuucucuggccccuaaggcucagaucaaagagagccugagagccgagcugagagugacagaaagacgggccugaggacuaguuauaagacugacuagcccgaugggccucccaacgggcccuccuccccuccuugcaccgagauuaauaaaaaaaaaaaaaaaaaaaaaaaaaaaaaaaaaaaaaaaaaaaaaaaaaaaaaaaaaaaaaaaaugcaucccccccccccccccccccccccccccccccaaaggcucuuuucagagccaccagaauu

SEQ ID NO: 190 - RNA, 877 nt, Artificial Sequence
  IL12A mRNA product opt3v
gggagaaagcuuaccaugugcccugccagaucucugcugcugguggcuacacuggugcugcuggaucaucugagccuggccagaaaccugccaguggccacgccugauccuggcauguuuccuugucugcaccacagccagaaccugcugagagccguguccaacaugcugcagaaggccagacagacccucgaguucuaccccugcaccagcgaggaaaucgaccacgaggacaucaccaaggacaagaccagcaccguggaagccugccugccucuggaacugaccaagaacgagagcugccugaacagccgggaaaccagcuucaucaccaacggcucuugccuggccuccagaaagaccuccuucaugauggcccugugccugagcagcaucuacgaggaccugaagauguaccaggucgaguucaagaccaugaacgccaagcugcugauggaccccaagcggcagaucuuccuggaccagaauaugcuggccgugaucgacgagcugaugcaggcccugaacuucaacagcgagacagugccccagaaguccagccuggaagaacccgacuucuacaagaccaagaucaagcugugcauccugcugcacgccuuccggaucagagccgugaccaucgacagagugaugagcuaccugaacgccuccugaggacuaguuauaagacugacuagcccgaugggccucccaacgggcccuccuccccuccuugcaccgagauuaauaaaaaaaaaaaaaaaaaaaaaaaaaaaaaaaaaaaaaaaaaaaaaaaaaaaaaaaaaaaaaaaaugcaucccccccccccccccccccccccccccccccaaaggcucuuuucagagccaccagaauu

SEQ ID NO: 191 - RNA, 874 nt, Artificial Sequence
  IL12A(1-219) mRNA product opt3v
gggagaaagcuuaccaugugcccugccagaucucugcugcugguggcuacacuggugcugcuggaucaucugagccuggccagaaaccugccaguggccacgccugauccuggcauguuuccuugucugcaccacagccagaaccugcugagagccguguccaacaugcugcagaaggccagacagacccucgaguucuaccccugcaccagcgaggaaaucgaccacgaggacaucaccaaggacaagaccagcaccguggaagccugccugccucuggaacugaccaagaacgagagcugccugaacagccgggaaaccagcuucaucaccaacggcucuugccuggccuccagaaagaccuccuucaugauggcccugugccugagcagcaucuacgaggaccugaagauguaccaggucgaguucaagaccaugaacgccaagcugcugauggaccccaagcggcagaucuuccuggaccagaauaugcuggccgugaucgacgagcugaugcaggcccugaacuucaacagcgagacagugccccagaaguccagccuggaagaacccgacuucuacaagaccaagaucaagcugugcauccugcugcacgccuuccggaucagagccgugaccaucgacagagugaugagcuaccugaacgccuccggacuaguuauaagacugacuagcccgaugggccucccaacgggcccuccuccccuccuugcaccgagauuaauaaaaaaaaaaaaaaaaaaaaaaaaaaaaaaaaaaaaaaaaaaaaaaaaaaaaaaaaaaaaaaaaugcaucccccccccccccccccccccccccccccccaaaggcucuuuucagagccaccagaauu

SEQ ID NO: 192 - RNA, 811 nt, Artificial Sequence
  IL12A(23-219) mRNA product opt3v
gggagaaagcuuaccagaaaccugccaguggccacgccugauccuggcauguuuccuugucugcaccacagccagaaccugcugagagccguguccaacaugcugcagaaggccagacagacccucgaguucuaccccugcaccagcgaggaaaucgaccacgaggacaucaccaaggacaagaccagcaccguggaagccugccugccucuggaacugaccaagaacgagagcugccugaacagccgggaaaccagcuucaucaccaacggcucuugccuggccuccagaaagaccuccuucaugauggcccugugccugagcagcaucuacgaggaccugaagauguaccaggucgaguucaagaccaugaacgccaagcugcugauggaccccaagcggcagaucuuccuggaccagaauaugcuggccgugaucgacgagcugaugcaggcccugaacuucaacagcgagacagugccccagaaguccagccuggaagaacccgacuucuacaagaccaagaucaagcugugcauccugcugcacgccuuccggaucagagccgugaccaucgacagagugaugagcuaccugaacgccuccugaggacuaguuauaagacugacuagcccgaugggccucccaacgggcccuccuccccuccuugcaccgagauuaauaaaaaaaaaaaaaaaaaaaaaaaaaaaaaaaaaaaaaaaaaaaaaaaaaaaaaaaaaaaaaaaaugcaucccccccccccccccccccccccccccccccaaaggcucuuuucagagccaccagaauu

SEQ ID NO: 193 - RNA, 1204 nt, Artificial Sequence
  IL12B mRNA product opt3v
gggagaaagcuuaccaugugucaccagcagcuggucaucagcugguucagccugguguuccuggccucuccucugguggccaucugggagcugaagaaagacguguacgugguggaacuggacugguaucccgaugcuccuggcgagaugguggugcugaccugcgauaccccugaagaggacggcaucaccuggacacuggaucagucuagcgaggugcucggcagcggcaagacccugaccauccaagugaaagaguuuggcgacgccggccaguacaccugucacaaaggcggagaagugcugagccacagccugcugcugcuccacaagaaagaggauggcauuuggagcaccgacauccugaaggaccagaaagagcccaagaacaagaccuuccugagaugcgaggccaagaacuacagcggccgguucacauguugguggcugaccaccaucagcaccgaccugaccuucagcgugaaguccagcagaggcagcagugauccucagggcguuacauguggcgccgcuacacugucugccgaaagagugcggggcgacaacaaagaauacgaguacagcguggaaugccaagaggacagcgccuguccagccgccgaagagucucugccuaucgaagugaugguggacgccgugcacaagcugaaguacgagaacuacaccuccagcuuuuucauccgggacaucaucaagcccgauccuccaaagaaccugcagcugaagccucugaagaacagcagacagguggaaguguccugggaguaccccgacaccuggucuacaccccacagcuacuucagccugaccuuuugcgugcaagugcagggcaaguccaagcgcgagaaaaaggaccggguguucaccgacaagaccagcgccaccgugaucugcagaaagaacgccagcaucagcgucagagcccaggaccgguacuacagcagcucuuggagcgaaugggccagcgugccauguagcuaaggacuaguuauaagacugacuagcccgaugggccucccaacgggcccuccuccccuccuugcaccgagauuaauaaaaaaaaaaaaaaaaaaaaaaaaaaaaaaaaaaaaaaaaaaaaaaaaaaaaaaaaaaaaaaaaugcaucccccccccccccccccccccccccccccccaaaggcucuuuucagagccaccagaauu

SEQ ID NO: 194 - RNA, 1201 nt, Artificial Sequence
  IL12B(1-328) mRNA product opt3v
gggagaaagcuuaccaugugucaccagcagcuggucaucagcugguucagccugguguuccuggccucuccucugguggccaucugggagcugaagaaagacguguacgugguggaacuggacugguaucccgaugcuccuggcgagaugguggugcugaccugcgauaccccugaagaggacggcaucaccuggacacuggaucagucuagcgaggugcucggcagcggcaagacccugaccauccaagugaaagaguuuggcgacgccggccaguacaccugucacaaaggcggagaagugcugagccacagccugcugcugcuccacaagaaagaggauggcauuuggagcaccgacauccugaaggaccagaaagagcccaagaacaagaccuuccugagaugcgaggccaagaacuacagcggccgguucacauguugguggcugaccaccaucagcaccgaccugaccuucagcgugaaguccagcagaggcagcagugauccucagggcguuacauguggcgccgcuacacugucugccgaaagagugcggggcgacaacaaagaauacgaguacagcguggaaugccaagaggacagcgccuguccagccgccgaagagucucugccuaucgaagugaugguggacgccgugcacaagcugaaguacgagaacuacaccuccagcuuuuucauccgggacaucaucaagcccgauccuccaaagaaccugcagcugaagccucugaagaacagcagacagguggaaguguccugggaguaccccgacaccuggucuacaccccacagcuacuucagccugaccuuuugcgugcaagugcagggcaaguccaagcgcgagaaaaaggaccggguguucaccgacaagaccagcgccaccgugaucugcagaaagaacgccagcaucagcgucagagcccaggaccgguacuacagcagcucuuggagcgaaugggccagcgugccauguagcggacuaguuauaagacugacuagcccgaugggccucccaacgggcccuccuccccuccuugcaccgagauuaauaaaaaaaaaaaaaaaaaaaaaaaaaaaaaaaaaaaaaaaaaaaaaaaaaaaaaaaaaaaaaaaaugcaucccccccccccccccccccccccccccccccaaaggcucuuuucagagccaccagaauu

SEQ ID NO: 195 - RNA, 1138 nt, Artificial Sequence
  IL12B(23-328) mRNA product opt3v
gggagaaagcuuaccaucugggagcugaagaaagacguguacgugguggaacuggacugguaucccgaugcuccuggcgagaugguggugcugaccugcgauaccccugaagaggacggcaucaccuggacacuggaucagucuagcgaggugcucggcagcggcaagacccugaccauccaagugaaagaguuuggcgacgccggccaguacaccugucacaaaggcggagaagugcugagccacagccugcugcugcuccacaagaaagaggauggcauuuggagcaccgacauccugaaggaccagaaagagcccaagaacaagaccuuccugagaugcgaggccaagaacuacagcggccgguucacauguugguggcugaccaccaucagcaccgaccugaccuucagcgugaaguccagcagaggcagcagugauccucagggcguuacauguggcgccgcuacacugucugccgaaagagugcggggcgacaacaaagaauacgaguacagcguggaaugccaagaggacagcgccuguccagccgccgaagagucucugccuaucgaagugaugguggacgccgugcacaagcugaaguacgagaacuacaccuccagcuuuuucauccgggacaucaucaagcccgauccuccaaagaaccugcagcugaagccucugaagaacagcagacagguggaaguguccugggaguaccccgacaccuggucuacaccccacagcuacuucagccugaccuuuugcgugcaagugcagggcaaguccaagcgcgagaaaaaggaccggguguucaccgacaagaccagcgccaccgugaucugcagaaagaacgccagcaucagcgucagagcccaggaccgguacuacagcagcucuuggagcgaaugggccagcgugccauguagcuaaggacuaguuauaagacugacuagcccgaugggccucccaacgggcccuccuccccuccuugcaccgagauuaauaaaaaaaaaaaaaaaaaaaaaaaaaaaaaaaaaaaaaaaaaaaaaaaaaaaaaaaaaaaaaaaaugcaucccccccccccccccccccccccccccccccaaaggcucuuuucagagccaccagaauu

SEQ ID NO: 196 - RNA, 271 nt, Artificial Sequence
  Linker-sFvCC49-218 mRNA product opt3v
gggagaaagcuuaccggcucuacaucuggcucuggcaaaccuggaucuggcgagggcucuacaaagggcggacuaguuauaagacugacuagcccgaugggccucccaacgggcccuccuccccuccuugcaccgagauuaauaaaaaaaaaaaaaaaaaaaaaaaaaaaaaaaaaaaaaaaaaaaaaaaaaaaaaaaaaaaaaaaaugcaucccccccccccccccccccccccccccccccaaaggcucuuuucagagccaccagaauu

SEQ ID NO: 197 - RNA, 1849 nt, Artificial Sequence
  IL12 mRNA product opt3v
gggagaaagcuuaccaugugucaccagcagcuggucaucagcugguucagccugguguuccuggccucuccucugguggccaucugggagcugaagaaagacguguacgugguggaacuggacugguaucccgaugcuccuggcgagaugguggugcugaccugcgauaccccugaagaggacggcaucaccuggacacuggaucagucuagcgaggugcucggcagcggcaagacccugaccauccaagugaaagaguuuggcgacgccggccaguacaccugucacaaaggcggagaagugcugagccacagccugcugcugcuccacaagaaagaggauggcauuuggagcaccgacauccugaaggaccagaaagagcccaagaacaagaccuuccugagaugcgaggccaagaacuacagcggccgguucacauguugguggcugaccaccaucagcaccgaccugaccuucagcgugaaguccagcagaggcagcagugauccucagggcguuacauguggcgccgcuacacugucugccgaaagagugcggggcgacaacaaagaauacgaguacagcguggaaugccaagaggacagcgccuguccagccgccgaagagucucugccuaucgaagugaugguggacgccgugcacaagcugaaguacgagaacuacaccuccagcuuuuucauccgggacaucaucaagcccgauccuccaaagaaccugcagcugaagccucugaagaacagcagacagguggaaguguccugggaguaccccgacaccuggucuacaccccacagcuacuucagccugaccuuuugcgugcaagugcagggcaaguccaagcgcgagaaaaaggaccggguguucaccgacaagaccagcgccaccgugaucugcagaaagaacgccagcaucagcgucagagcccaggaccgguacuacagcagcucuuggagcgaaugggccagcgugccauguagcggcucuacaucuggcucuggcaaaccuggaucuggcgagggcucuacaaagggcagaaaccugccaguggccacgccugauccuggcauguuuccuugucugcaccacagccagaaccugcugagagccguguccaacaugcugcagaaggccagacagacccucgaguucuaccccugcaccagcgaggaaaucgaccacgaggacaucaccaaggacaagaccagcaccguggaagccugccugccucuggaacugaccaagaacgagagcugccugaacagccgggaaaccagcuucaucaccaacggcucuugccuggccuccagaaagaccuccuucaugauggcccugugccugagcagcaucuacgaggaccugaagauguaccaggucgaguucaagaccaugaacgccaagcugcugauggaccccaagcggcagaucuuccuggaccagaauaugcuggccgugaucgacgagcugaugcaggcccugaacuucaacagcgagacagugccccagaaguccagccuggaagaacccgacuucuacaagaccaagaucaagcugugcauccugcugcacgccuuccggaucagagccgugaccaucgacagagugaugagcuaccugaacgccuccugaggacuaguuauaagacugacuagcccgaugggccucccaacgggcccuccuccccuccuugcaccgagauuaauaaaaaaaaaaaaaaaaaaaaaaaaaaaaaaaaaaaaaaaaaaaaaaaaaaaaaaaaaaaaaaaaugcaucccccccccccccccccccccccccccccccaaaggcucuuuucagagccaccagaauu

SEQ ID NO: 198 - RNA, 1003 nt, Artificial Sequence
  CD40LG mRNA product opt3v
gggagaaagcuuaccaugaucgagacauacaaccagacaagccccagaagcgccgccacaggacugccuaucagcaugaagaucuuuauguaccugcugaccguguuccugaucacccagaugaucggcagcgcccuguuugccguguaccugcacagacggcuggacaagaucgaggacgagagaaaccugcacgaggacuucguguucaugaagaccauccagcggugcaacaccggcgagagaagucugagccugcugaacugcgaggaaaucaagagccaguucgagggcuucgugaaggacaucaugcugaacaaagaggaaacgaagaaagaaaacuccuucgagaugcagaagggcgaccagaauccucagaucgccgcucacgugaucagcgaggccagcagcaagacaacaagcgugcugcagugggccgagaagggcuacuacaccaugagcaacaaccuggucacccuggaaaacggcaagcagcugacagugaagcggcagggccuguacuacaucuacgcccaagugaccuucugcagcaacagagaggccagcucucaggccccuuuuaucgccagccugugccugaaguccccuggcagauucgagcggauucugcugagagccgccaacacacacagcagcgccaaaccuuguggccagcagucuauucaccucggcggaguguuugagcugcagccuggcgcaagcguguucgugaaugugacagacccuagccaggugucccacggcaccggcuuuacaucuuucggacugcugaagcugugaggacuaguuauaagacugacuagcccgaugggccucccaacgggcccuccuccccuccuugcaccgagauuaauaaaaaaaaaaaaaaaaaaaaaaaaaaaaaaaaaaaaaaaaaaaaaaaaaaaaaaaaaaaaaaaaugcaucccccccccccccccccccccccccccccccaaaggcucuuuucagagccaccagaauu

SEQ ID NO: 199 - RNA, 1084 nt, Artificial Sequence
  PDCD1 mRNA product opt4
gggagaaagcuuaccaugcagaucccccaggcccccuggcccguggugugggccgugcugcagcugggcuggagacccggcugguuccuggacagccccgacagacccuggaacccccccaccuucagccccgcccugcugguggugaccgagggcgacaacgccaccuucaccuguagcuucagcaacaccagcgagagcuucgugcugaacugguacagaaugagccccagcaaccagaccgacaagcuggccgccuuccccgaggacagaagccagcccggccaggacugcagauucagagugacccagcugcccaacggcagagacuuccacaugagcguggugagagccagaagaaacgacagcggcaccuaccugugcggcgccaucagccuggcccccaaggcccagaucaaggagagccugagagccgagcugagagugaccgagagaagggccgaggugcccaccgcccaccccagccccagccccagacccgccggccaguuccagacccugguggugggcguggugggcggccugcugggcagccuggugcugcuggugugggugcuggccgugaucugcagcagagccgccagaggcaccaucggcgccagaagaaccggccagccccugaaggaggaccccagcgccgugcccguguucagcguggacuacggcgagcuggacuuccaguggagagagaagacccccgagccccccgugcccugcgugcccgagcagaccgaguacgccaccaucguguuccccagcggcaugggcaccagcagccccgccagaagaggcagcgccgacggccccagaagcgcccagccccugagacccgaggacggccacugcagcuggccccugugaggacuaguuauaagacugacuagcccgaugggccucccaacgggcccuccuccccuccuugcaccgagauuaauaaaaaaaaaaaaaaaaaaaaaaaaaaaaaaaaaaaaaaaaaaaaaaaaaaaaaaaaaaaaaaaaugcaucccccccccccccccccccccccccccccccaaaggcucuuuucagagccaccagaauu

SEQ ID NO: 200 - RNA, 667 nt, Artificial Sequence
  PDCD1(1-149) mRNA product opt4
gggagaaagcuuaccaugcagaucccccaggcccccuggcccguggugugggccgugcugcagcugggcuggagacccggcugguuccuggacagccccgacagacccuggaacccccccaccuucagccccgcccugcugguggugaccgagggcgacaacgccaccuucaccuguagcuucagcaacaccagcgagagcuucgugcugaacugguacagaaugagccccagcaaccagaccgacaagcuggccgccuuccccgaggacagaagccagcccggccaggacugcagauucagagugacccagcugcccaacggcagagacuuccacaugagcguggugagagccagaagaaacgacagcggcaccuaccugugcggcgccaucagccuggcccccaaggcccagaucaaggagagccugagagccgagcugagagugaccgagagaagggccugaggacuaguuauaagacugacuagcccgaugggccucccaacgggcccuccuccccuccuugcaccgagauuaauaaaaaaaaaaaaaaaaaaaaaaaaaaaaaaaaaaaaaaaaaaaaaaaaaaaaaaaaaaaaaaaaugcaucccccccccccccccccccccccccccccccaaaggcucuuuucagagccaccagaauu

SEQ ID NO: 201 - RNA, 877 nt, Artificial Sequence
  IL12A mRNA product opt4
gggagaaagcuuaccaugugccccgccagaagccugcugcugguggccacccuggugcugcuggaccaccugagccuggccagaaaccugcccguggccacccccgaccccggcauguuccccugccugcaccacagccagaaccugcugagagccgugagcaacaugcugcagaaggccagacagacccuggaguucuaccccugcaccagcgaggagaucgaccacgaggacaucaccaaggacaagaccagcaccguggaggccugccugccccuggagcugaccaagaacgagagcugccugaacagcagagagaccagcuucaucaccaacggcagcugccuggccagcagaaagaccagcuucaugauggcccugugccugagcagcaucuacgaggaccugaagauguaccagguggaguucaagaccaugaacgccaagcugcugauggaccccaagagacagaucuuccuggaccagaacaugcuggccgugaucgacgagcugaugcaggcccugaacuucaacagcgagaccgugccccagaagaguagccuggaggagcccgacuucuacaagaccaagaucaagcugugcauccugcugcacgccuucagaaucagagccgugaccaucgacagagugaugagcuaccugaacgccagcugaggacuaguuauaagacugacuagcccgaugggccucccaacgggcccuccuccccuccuugcaccgagauuaauaaaaaaaaaaaaaaaaaaaaaaaaaaaaaaaaaaaaaaaaaaaaaaaaaaaaaaaaaaaaaaaaugcaucccccccccccccccccccccccccccccccaaaggcucuuuucagagccaccagaauu

SEQ ID NO: 202 - RNA, 874 nt, Artificial Sequence
  IL12A(1-219) mRNA product opt4
gggagaaagcuuaccaugugccccgccagaagccugcugcugguggccacccuggugcugcuggaccaccugagccuggccagaaaccugcccguggccacccccgaccccggcauguuccccugccugcaccacagccagaaccugcugagagccgugagcaacaugcugcagaaggccagacagacccuggaguucuaccccugcaccagcgaggagaucgaccacgaggacaucaccaaggacaagaccagcaccguggaggccugccugccccuggagcugaccaagaacgagagcugccugaacagcagagagaccagcuucaucaccaacggcagcugccuggccagcagaaagaccagcuucaugauggcccugugccugagcagcaucuacgaggaccugaagauguaccagguggaguucaagaccaugaacgccaagcugcugauggaccccaagagacagaucuuccuggaccagaacaugcuggccgugaucgacgagcugaugcaggcccugaacuucaacagcgagaccgugccccagaagaguagccuggaggagcccgacuucuacaagaccaagaucaagcugugcauccugcugcacgccuucagaaucagagccgugaccaucgacagagugaugagcuaccugaacgccagcggacuaguuauaagacugacuagcccgaugggccucccaacgggcccuccuccccuccuugcaccgagauuaauaaaaaaaaaaaaaaaaaaaaaaaaaaaaaaaaaaaaaaaaaaaaaaaaaaaaaaaaaaaaaaaaugcaucccccccccccccccccccccccccccccccaaaggcucuuuucagagccaccagaauu

SEQ ID NO: 203 - RNA, 811 nt, Artificial Sequence
  IL12A(23-219) mRNA product opt4
gggagaaagcuuaccagaaaccugcccguggccacccccgaccccggcauguuccccugccugcaccacagccagaaccugcugagagccgugagcaacaugcugcagaaggccagacagacccuggaguucuaccccugcaccagcgaggagaucgaccacgaggacaucaccaaggacaagaccagcaccguggaggccugccugccccuggagcugaccaagaacgagagcugccugaacagcagagagaccagcuucaucaccaacggcagcugccuggccagcagaaagaccagcuucaugauggcccugugccugagcagcaucuacgaggaccugaagauguaccagguggaguucaagaccaugaacgccaagcugcugauggaccccaagagacagaucuuccuggaccagaacaugcuggccgugaucgacgagcugaugcaggcccugaacuucaacagcgagaccgugccccagaagaguagccuggaggagcccgacuucuacaagaccaagaucaagcugugcauccugcugcacgccuucagaaucagagccgugaccaucgacagagugaugagcuaccugaacgccagcugaggacuaguuauaagacugacuagcccgaugggccucccaacgggcccuccuccccuccuugcaccgagauuaauaaaaaaaaaaaaaaaaaaaaaaaaaaaaaaaaaaaaaaaaaaaaaaaaaaaaaaaaaaaaaaaaugcaucccccccccccccccccccccccccccccccaaaggcucuuuucagagccaccagaauu

SEQ ID NO: 204 - RNA, 1204 nt, Artificial Sequence
  IL12B mRNA product opt4
gggagaaagcuuaccaugugccaccagcagcuggugaucagcugguucagccugguguuccuggccagcccccugguggccaucugggagcugaagaaggacguguacgugguggagcuggacugguaccccgacgcccccggcgagaugguggugcugaccugcgacacccccgaggaggacggcaucaccuggacccuggaccagagcagcgaggugcugggcagcggcaagacccugaccauccaggugaaggaguucggcgacgccggccaguacaccugucacaagggcggcgaggugcugagccacagccugcugcugcugcacaagaaggaggacggcaucuggagcaccgacauccugaaggaccagaaggagcccaagaacaagaccuuccugagaugcgaggccaagaacuacagcggcagauucaccuguugguggcugaccaccaucagcaccgaccugaccuucagcgugaagaguagcagaggcagcagcgacccccagggcgugaccugcggcgccgccacccugagcgccgagagagugagaggcgacaacaaggaguacgaguacagcguggagugccaggaggacagcgccugccccgccgccgaggagagccugcccaucgaggugaugguggacgccgugcacaagcugaaguacgagaacuacaccagcagcuucuucaucagagacaucaucaagcccgacccccccaagaaccugcagcugaagccccugaagaacagcagacagguggaggugagcugggaguaccccgacaccuggagcaccccccacagcuacuucagccugaccuucugcgugcagguucagggcaagagcaagagagagaagaaggacagaguguucaccgacaagaccagcgccaccgugaucugcagaaagaacgccagcaucagcgugagagcccaggacagauacuacagcagcagcuggagcgagugggccagcgugcccugcagcugaggacuaguuauaagacugacuagcccgaugggccucccaacgggcccuccuccccuccuugcaccgagauuaauaaaaaaaaaaaaaaaaaaaaaaaaaaaaaaaaaaaaaaaaaaaaaaaaaaaaaaaaaaaaaaaaugcaucccccccccccccccccccccccccccccccaaaggcucuuuucagagccaccagaauu

SEQ ID NO: 205 - RNA, 1201 nt, Artificial Sequence
  IL12B(1-328) mRNA product opt4
gggagaaagcuuaccaugugccaccagcagcuggugaucagcugguucagccugguguuccuggccagcccccugguggccaucugggagcugaagaaggacguguacgugguggagcuggacugguaccccgacgcccccggcgagaugguggugcugaccugcgacacccccgaggaggacggcaucaccuggacccuggaccagagcagcgaggugcugggcagcggcaagacccugaccauccaggugaaggaguucggcgacgccggccaguacaccugucacaagggcggcgaggugcugagccacagccugcugcugcugcacaagaaggaggacggcaucuggagcaccgacauccugaaggaccagaaggagcccaagaacaagaccuuccugagaugcgaggccaagaacuacagcggcagauucaccuguugguggcugaccaccaucagcaccgaccugaccuucagcgugaagaguagcagaggcagcagcgacccccagggcgugaccugcggcgccgccacccugagcgccgagagagugagaggcgacaacaaggaguacgaguacagcguggagugccaggaggacagcgccugccccgccgccgaggagagccugcccaucgaggugaugguggacgccgugcacaagcugaaguacgagaacuacaccagcagcuucuucaucagagacaucaucaagcccgacccccccaagaaccugcagcugaagccccugaagaacagcagacagguggaggugagcugggaguaccccgacaccuggagcaccccccacagcuacuucagccugaccuucugcgugcagguucagggcaagagcaagagagagaagaaggacagaguguucaccgacaagaccagcgccaccgugaucugcagaaagaacgccagcaucagcgugagagcccaggacagauacuacagcagcagcuggagcgagugggccagcgugcccugcagcggacuaguuauaagacugacuagcccgaugggccucccaacgggcccuccuccccuccuugcaccgagauuaauaaaaaaaaaaaaaaaaaaaaaaaaaaaaaaaaaaaaaaaaaaaaaaaaaaaaaaaaaaaaaaaaugcaucccccccccccccccccccccccccccccccaaaggcucuuuucagagccaccagaauu

SEQ ID NO: 206 - RNA, 1138 nt, Artificial Sequence
  IL12B(23-328) mRNA product opt4
gggagaaagcuuaccaucugggagcugaagaaggacguguacgugguggagcuggacugguaccccgacgcccccggcgagaugguggugcugaccugcgacacccccgaggaggacggcaucaccuggacccuggaccagagcagcgaggugcugggcagcggcaagacccugaccauccaggugaaggaguucggcgacgccggccaguacaccugucacaagggcggcgaggugcugagccacagccugcugcugcugcacaagaaggaggacggcaucuggagcaccgacauccugaaggaccagaaggagcccaagaacaagaccuuccugagaugcgaggccaagaacuacagcggcagauucaccuguugguggcugaccaccaucagcaccgaccugaccuucagcgugaagaguagcagaggcagcagcgacccccagggcgugaccugcggcgccgccacccugagcgccgagagagugagaggcgacaacaaggaguacgaguacagcguggagugccaggaggacagcgccugccccgccgccgaggagagccugcccaucgaggugaugguggacgccgugcacaagcugaaguacgagaacuacaccagcagcuucuucaucagagacaucaucaagcccgacccccccaagaaccugcagcugaagccccugaagaacagcagacagguggaggugagcugggaguaccccgacaccuggagcaccccccacagcuacuucagccugaccuucugcgugcagguucagggcaagagcaagagagagaagaaggacagaguguucaccgacaagaccagcgccaccgugaucugcagaaagaacgccagcaucagcgugagagcccaggacagauacuacagcagcagcuggagcgagugggccagcgugcccugcagcugaggacuaguuauaagacugacuagcccgaugggccucccaacgggcccuccuccccuccuugcaccgagauuaauaaaaaaaaaaaaaaaaaaaaaaaaaaaaaaaaaaaaaaaaaaaaaaaaaaaaaaaaaaaaaaaaugcaucccccccccccccccccccccccccccccccaaaggcucuuuucagagccaccagaauu

SEQ ID NO: 207 - RNA, 271 nt, Artificial Sequence
  Linker-sFvCC49-218 mRNA product opt4
gggagaaagcuuaccggcagcaccagcggcagcggcaagcccggcagcggcgagggcagcaccaagggcggacuaguuauaagacugacuagcccgaugggccucccaacgggcccuccuccccuccuugcaccgagauuaauaaaaaaaaaaaaaaaaaaaaaaaaaaaaaaaaaaaaaaaaaaaaaaaaaaaaaaaaaaaaaaaaugcaucccccccccccccccccccccccccccccccaaaggcucuuuucagagccaccagaauu

SEQ ID NO: 208 - RNA, 1849 nt, Artificial Sequence
  IL12 mRNA product opt4
gggagaaagcuuaccaugugccaccagcagcuggugaucagcugguucagccugguguuccuggccagcccccugguggccaucugggagcugaagaaggacguguacgugguggagcuggacugguaccccgacgcccccggcgagaugguggugcugaccugcgacacccccgaggaggacggcaucaccuggacccuggaccagagcagcgaggugcugggcagcggcaagacccugaccauccaggugaaggaguucggcgacgccggccaguacaccugucacaagggcggcgaggugcugagccacagccugcugcugcugcacaagaaggaggacggcaucuggagcaccgacauccugaaggaccagaaggagcccaagaacaagaccuuccugagaugcgaggccaagaacuacagcggcagauucaccuguugguggcugaccaccaucagcaccgaccugaccuucagcgugaagaguagcagaggcagcagcgacccccagggcgugaccugcggcgccgccacccugagcgccgagagagugagaggcgacaacaaggaguacgaguacagcguggagugccaggaggacagcgccugccccgccgccgaggagagccugcccaucgaggugaugguggacgccgugcacaagcugaaguacgagaacuacaccagcagcuucuucaucagagacaucaucaagcccgacccccccaagaaccugcagcugaagccccugaagaacagcagacagguggaggugagcugggaguaccccgacaccuggagcaccccccacagcuacuucagccugaccuucugcgugcagguucagggcaagagcaagagagagaagaaggacagaguguucaccgacaagaccagcgccaccgugaucugcagaaagaacgccagcaucagcgugagagcccaggacagauacuacagcagcagcuggagcgagugggccagcgugcccugcagcggcagcaccagcggcagcggcaagcccggcagcggcgagggcagcaccaagggcagaaaccugcccguggccacccccgaccccggcauguuccccugccugcaccacagccagaaccugcugagagccgugagcaacaugcugcagaaggccagacagacccuggaguucuaccccugcaccagcgaggagaucgaccacgaggacaucaccaaggacaagaccagcaccguggaggccugccugccccuggagcugaccaagaacgagagcugccugaacagcagagagaccagcuucaucaccaacggcagcugccuggccagcagaaagaccagcuucaugauggcccugugccugagcagcaucuacgaggaccugaagauguaccagguggaguucaagaccaugaacgccaagcugcugauggaccccaagagacagaucuuccuggaccagaacaugcuggccgugaucgacgagcugaugcaggcccugaacuucaacagcgagaccgugccccagaagaguagccuggaggagcccgacuucuacaagaccaagaucaagcugugcauccugcugcacgccuucagaaucagagccgugaccaucgacagagugaugagcuaccugaacgccagcugaggacuaguuauaagacugacuagcccgaugggccucccaacgggcccuccuccccuccuugcaccgagauuaauaaaaaaaaaaaaaaaaaaaaaaaaaaaaaaaaaaaaaaaaaaaaaaaaaaaaaaaaaaaaaaaaugcaucccccccccccccccccccccccccccccccaaaggcucuuuucagagccaccagaauu

SEQ ID NO: 209 - RNA, 1003 nt, Artificial Sequence
  CD40LG mRNA product opt4
gggagaaagcuuaccaugaucgagaccuacaaccagaccagccccagaagcgccgccaccggccugcccaucagcaugaagaucuucauguaccugcugaccguguuccugaucacccagaugaucggcagcgcccuguucgccguguaccugcacagaagacuggacaagaucgaggacgagagaaaccugcacgaggacuucguguucaugaagaccauccagagaugcaacaccggcgagagaagccugagccugcugaacugcgaggagaucaagagccaguucgagggcuucgugaaggacaucaugcugaacaaggaggagaccaagaaggagaacagcuucgagaugcagaagggcgaccagaacccccagaucgccgcccacgugaucagcgaggccagcagcaagaccaccagcgugcugcagugggccgagaagggcuacuacaccaugagcaacaaccuggugacccuggagaacggcaagcagcugaccgugaagagacagggccuguacuacaucuacgcccaggugaccuucugcagcaacagagaggccagcagccaggcccccuucaucgccagccugugccugaagagucccggcagauucgagagaauccugcugagagccgccaacacccacagcagcgccaagcccugcggccagcagagcauccaccugggcggcguguucgagcugcagcccggcgccagcguguucgugaacgugaccgaccccagccaggugagccacggcaccggcuucaccagcuucggccugcugaagcugugaggacuaguuauaagacugacuagcccgaugggccucccaacgggcccuccuccccuccuugcaccgagauuaauaaaaaaaaaaaaaaaaaaaaaaaaaaaaaaaaaaaaaaaaaaaaaaaaaaaaaaaaaaaaaaaaugcaucccccccccccccccccccccccccccccccaaaggcucuuuucagagccaccagaauu

SEQ ID NO: 210 - RNA, 1084 nt, Artificial Sequence
  PDCD1 mRNA product opt5
gggagaaagcuuaccaugcagaucccccaagccccuuggccgguggucugggcuguucugcagcucggcuggagacccgggugguuccuggacagcccugaucggcccuggaacccucccaccuuuuccccugcccuucugguggugacagagggagacaaugcgacguuuaccugcucuuucagcaacacauccgaaucuuucguccucaauugguaccgcaugagcccguccaaccagaccgauaagcuggcugccuuucccgaggacagaucucagccuggccaagauugucgguuccgcgugacacagcuucccaaugggagagacuuucacaugagcguugugcgggcccgcagaaacgauuccggaaccuaucugugcggcgcuauuagccucgccccuaaagcucagaucaaggaaucucugcgggccgagcugcgcgucacagaaagacgggcggaggugcccaccgcccauccguccccuagcccccgcccugcugggcaguuccaaacgcucguugugggagucgugggcggccugcuugggucucuggugcuccuggucuggguucuugccgugauuuguuccagagcugcccggggaaccaucggcgcgcgcagaacagggcagccccugaaagaggaccccagcgccgugccugucuuuucuguggauuacggagaacucgacuuccaguggcgggagaagaccccggaacccccuguucccugcgugccugagcagacagaguaugcuaccauugucuuucccuccggcauggggacgagcuccccggccagacgcggaucugcugauggcccucggagcgcccaaccccugagaccugaagacggccacuguuccuggccccugugaggacuaguuauaagacugacuagcccgaugggccucccaacgggcccuccuccccuccuugcaccgagauuaauaaaaaaaaaaaaaaaaaaaaaaaaaaaaaaaaaaaaaaaaaaaaaaaaaaaaaaaaaaaaaaaaugcaucccccccccccccccccccccccccccccccaaaggcucuuuucagagccaccagaauu

SEQ ID NO: 211 - RNA, 667 nt, Artificial Sequence
  PDCD1(1-149) mRNA product opt5
gggagaaagcuuaccaugcagaucccccaagccccuuggccgguggucugggcuguucugcagcucggcuggagacccgggugguuccuggacagcccugaucggcccuggaacccucccaccuuuuccccugcccuucugguggugacagagggagacaaugcgacguuuaccugcucuuucagcaacacauccgaaucuuucguccucaauugguaccgcaugagcccguccaaccagaccgauaagcuggcugccuuucccgaggacagaucucagccuggccaagauugucgguuccgcgugacacagcuucccaaugggagagacuuucacaugagcguugugcgggcccgcagaaacgauuccggaaccuaucugugcggcgcuauuagccucgccccuaaagcucagaucaaggaaucucugcgggccgagcugcgcgucacagaaagacgggcgugaggacuaguuauaagacugacuagcccgaugggccucccaacgggcccuccuccccuccuugcaccgagauuaauaaaaaaaaaaaaaaaaaaaaaaaaaaaaaaaaaaaaaaaaaaaaaaaaaaaaaaaaaaaaaaaaugcaucccccccccccccccccccccccccccccccaaaggcucuuuucagagccaccagaauu

SEQ ID NO: 212 - RNA, 877 nt, Artificial Sequence
  IL12A mRNA product opt5
gggagaaagcuuaccaugugccccgccagaagccugcuccugguggcuacccuuguccugcucgaccaccugucccuugcccggaaccugccuguugcgacaccggaucccggcauguucccuugucuccaucacucucagaaucugcugcgcgcugugagcaacaugcuccaaaaggccagacagacgcuggaguuuuaccccugcaccuccgaagagaucgaccaugaagauauuacaaaagacaagaccucuacaguggaggccugucuuccucuggaacucaccaaaaaugagagcugccugaacucccgggagacaucuuucaucaccaaugggagcugucuugcuucccgcaagacgagcuuuaugauggcccugugccucucuuccauuuaugaagaucugaaaauguaccaggucgaguucaagaccaugaacgcuaagcugcucauggaccccaaaagacagaucuuucuggaucaaaauaugcuugccgugauugacgaacugaugcaggcgcucaacuucaauagcgagacaguuccucagaagucuucccuggaggaaccggauuuuuauaaaaccaagaucaaacuuuguauccugcuccacgccuuccggauucgcgcugugacaaucgacagagucaugagcuaccugaacgccucuugaggacuaguuauaagacugacuagcccgaugggccucccaacgggcccuccuccccuccuugcaccgagauuaauaaaaaaaaaaaaaaaaaaaaaaaaaaaaaaaaaaaaaaaaaaaaaaaaaaaaaaaaaaaaaaaaugcaucccccccccccccccccccccccccccccccaaaggcucuuuucagagccaccagaauu

SEQ ID NO: 213 - RNA, 874 nt, Artificial Sequence
  IL12A(1-219) mRNA product opt5
gggagaaagcuuaccaugugccccgccagaagccugcuccugguggcuacccuuguccugcucgaccaccugucccuugcccggaaccugccuguugcgacaccggaucccggcauguucccuugucuccaucacucucagaaucugcugcgcgcugugagcaacaugcuccaaaaggccagacagacgcuggaguuuuaccccugcaccuccgaagagaucgaccaugaagauauuacaaaagacaagaccucuacaguggaggccugucuuccucuggaacucaccaaaaaugagagcugccugaacucccgggagacaucuuucaucaccaaugggagcugucuugcuucccgcaagacgagcuuuaugauggcccugugccucucuuccauuuaugaagaucugaaaauguaccaggucgaguucaagaccaugaacgcuaagcugcucauggaccccaaaagacagaucuuucuggaucaaaauaugcuugccgugauugacgaacugaugcaggcgcucaacuucaauagcgagacaguuccucagaagucuucccuggaggaaccggauuuuuauaaaaccaagaucaaacuuuguauccugcuccacgccuuccggauucgcgcugugacaaucgacagagucaugagcuaccugaacgccucuggacuaguuauaagacugacuagcccgaugggccucccaacgggcccuccuccccuccuugcaccgagauuaauaaaaaaaaaaaaaaaaaaaaaaaaaaaaaaaaaaaaaaaaaaaaaaaaaaaaaaaaaaaaaaaaugcaucccccccccccccccccccccccccccccccaaaggcucuuuucagagccaccagaauu

SEQ ID NO: 214 - RNA, 811 nt, Artificial Sequence
  IL12A(23-219) mRNA product opt5
gggagaaagcuuacccggaaccugccuguugcgacaccggaucccggcauguucccuugucuccaucacucucagaaucugcugcgcgcugugagcaacaugcuccaaaaggccagacagacgcuggaguuuuaccccugcaccuccgaagagaucgaccaugaagauauuacaaaagacaagaccucuacaguggaggccugucuuccucuggaacucaccaaaaaugagagcugccugaacucccgggagacaucuuucaucaccaaugggagcugucuugcuucccgcaagacgagcuuuaugauggcccugugccucucuuccauuuaugaagaucugaaaauguaccaggucgaguucaagaccaugaacgcuaagcugcucauggaccccaaaagacagaucuuucuggaucaaaauaugcuugccgugauugacgaacugaugcaggcgcucaacuucaauagcgagacaguuccucagaagucuucccuggaggaaccggauuuuuauaaaaccaagaucaaacuuuguauccugcuccacgccuuccggauucgcgcugugacaaucgacagagucaugagcuaccugaacgccucuugaggacuaguuauaagacugacuagcccgaugggccucccaacgggcccuccuccccuccuugcaccgagauuaauaaaaaaaaaaaaaaaaaaaaaaaaaaaaaaaaaaaaaaaaaaaaaaaaaaaaaaaaaaaaaaaaugcaucccccccccccccccccccccccccccccccaaaggcucuuuucagagccaccagaauu

SEQ ID NO: 215 - RNA, 1204 nt, Artificial Sequence
  IL12B mRNA product opt5
gggagaaagcuuaccaugugccaccagcaacuggugaucagcugguucucccucgucuuucuggccucuccccuuguugcuauuugggagcugaagaaagacguguacguggucgaacucgauugguauccugacgccccgggcgagauggugguucugaccugugauacacccgaagaggacgggaucacguggacccuugaucagagcuccgaagugcugggaucuggcaagacacucaccauucaggucaaagaguucggggacgcgggacaguacacaugccauaagggcggggaggugcugagccacucccugcuccugcuucauaaaaaggaagauggaaucuggucuaccgacauucugaaggaucaaaaagagccuaagaacaaaacauuucucagaugugaagcuaagaauuauagcggccgguuuaccugcugguggcugacgaccaucuccacagaccuuaccuucagcguuaaaucuucccgcggcagcucugauccccagggggugacauguggagccgccacccuguccgcugagagaguccggggcgacaacaaggaguacgaauauagcguggagugccaggaagauucugccuguccugcugccgaggaaucccuccccaucgaggugauggucgacgcgguucacaagcugaaauacgagaauuauacgagcuccuucuuuauucgcgacaucauuaagccugauccgcccaaaaaccugcagcucaagccucugaaaaauucuagacaaguggaagugagcugggaguaccccgacacaugguccaccccucauagcuacuucucucuuacauuuugcguccaggugcaggggaaguccaaacgggaaaagaaggaucgcguuuucaccgacaaaaccagcgccacagugaucuguagaaagaacgcuucuauuagcguccgggcccaggaucgcuauuacuccucuagcugguccgagugggcuagcgugcccugcucuugaggacuaguuauaagacugacuagcccgaugggccucccaacgggcccuccuccccuccuugcaccgagauuaauaaaaaaaaaaaaaaaaaaaaaaaaaaaaaaaaaaaaaaaaaaaaaaaaaaaaaaaaaaaaaaaaugcaucccccccccccccccccccccccccccccccaaaggcucuuuucagagccaccagaauu

SEQ ID NO: 216 - RNA, 1201 nt, Artificial Sequence
  IL12B(1-328) mRNA product opt5
gggagaaagcuuaccaugugccaccagcaacuggugaucagcugguucucccucgucuuucuggccucuccccuuguugcuauuugggagcugaagaaagacguguacguggucgaacucgauugguauccugacgccccgggcgagauggugguucugaccugugauacacccgaagaggacgggaucacguggacccuugaucagagcuccgaagugcugggaucuggcaagacacucaccauucaggucaaagaguucggggacgcgggacaguacacaugccauaagggcggggaggugcugagccacucccugcuccugcuucauaaaaaggaagauggaaucuggucuaccgacauucugaaggaucaaaaagagccuaagaacaaaacauuucucagaugugaagcuaagaauuauagcggccgguuuaccugcugguggcugacgaccaucuccacagaccuuaccuucagcguuaaaucuucccgcggcagcucugauccccagggggugacauguggagccgccacccuguccgcugagagaguccggggcgacaacaaggaguacgaauauagcguggagugccaggaagauucugccuguccugcugccgaggaaucccuccccaucgaggugauggucgacgcgguucacaagcugaaauacgagaauuauacgagcuccuucuuuauucgcgacaucauuaagccugauccgcccaaaaaccugcagcucaagccucugaaaaauucuagacaaguggaagugagcugggaguaccccgacacaugguccaccccucauagcuacuucucucuuacauuuugcguccaggugcaggggaaguccaaacgggaaaagaaggaucgcguuuucaccgacaaaaccagcgccacagugaucuguagaaagaacgcuucuauuagcguccgggcccaggaucgcuauuacuccucuagcugguccgagugggcuagcgugcccugcucuggacuaguuauaagacugacuagcccgaugggccucccaacgggcccuccuccccuccuugcaccgagauuaauaaaaaaaaaaaaaaaaaaaaaaaaaaaaaaaaaaaaaaaaaaaaaaaaaaaaaaaaaaaaaaaaugcaucccccccccccccccccccccccccccccccaaaggcucuuuucagagccaccagaauu

SEQ ID NO: 217 - RNA, 1138 nt, Artificial Sequence
  IL12B(23-328) mRNA product opt5
gggagaaagcuuaccauuugggagcugaagaaagacguguacguggucgaacucgauugguauccugacgccccgggcgagauggugguucugaccugugauacacccgaagaggacgggaucacguggacccuugaucagagcuccgaagugcugggaucuggcaagacacucaccauucaggucaaagaguucggggacgcgggacaguacacaugccauaagggcggggaggugcugagccacucccugcuccugcuucauaaaaaggaagauggaaucuggucuaccgacauucugaaggaucaaaaagagccuaagaacaaaacauuucucagaugugaagcuaagaauuauagcggccgguuuaccugcugguggcugacgaccaucuccacagaccuuaccuucagcguuaaaucuucccgcggcagcucugauccccagggggugacauguggagccgccacccuguccgcugagagaguccggggcgacaacaaggaguacgaauauagcguggagugccaggaagauucugccuguccugcugccgaggaaucccuccccaucgaggugauggucgacgcgguucacaagcugaaauacgagaauuauacgagcuccuucuuuauucgcgacaucauuaagccugauccgcccaaaaaccugcagcucaagccucugaaaaauucuagacaaguggaagugagcugggaguaccccgacacaugguccaccccucauagcuacuucucucuuacauuuugcguccaggugcaggggaaguccaaacgggaaaagaaggaucgcguuuucaccgacaaaaccagcgccacagugaucuguagaaagaacgcuucuauuagcguccgggcccaggaucgcuauuacuccucuagcugguccgagugggcuagcgugcccugcucuugaggacuaguuauaagacugacuagcccgaugggccucccaacgggcccuccuccccuccuugcaccgagauuaauaaaaaaaaaaaaaaaaaaaaaaaaaaaaaaaaaaaaaaaaaaaaaaaaaaaaaaaaaaaaaaaaugcaucccccccccccccccccccccccccccccccaaaggcucuuuucagagccaccagaauu

SEQ ID NO: 218 - RNA, 271 nt, Artificial Sequence
  Linker-sFvCC49-218 mRNA product opt5
gggagaaagcuuaccggcagcaccuccgggucuggaaagcccggcagcggggagggauccacaaaaggcggacuaguuauaagacugacuagcccgaugggccucccaacgggcccuccuccccuccuugcaccgagauuaauaaaaaaaaaaaaaaaaaaaaaaaaaaaaaaaaaaaaaaaaaaaaaaaaaaaaaaaaaaaaaaaaugcaucccccccccccccccccccccccccccccccaaaggcucuuuucagagccaccagaauu

SEQ ID NO: 219 - RNA, 1849 nt, Artificial Sequence
  IL12 mRNA product opt5
gggagaaagcuuaccaugugccaccagcaacuggugaucagcugguucucccucgucuuucuggccucuccccuuguugcuauuugggagcugaagaaagacguguacguggucgaacucgauugguauccugacgccccgggcgagauggugguucugaccugugauacacccgaagaggacgggaucacguggacccuugaucagagcuccgaagugcugggaucuggcaagacacucaccauucaggucaaagaguucggggacgcgggacaguacacaugccauaagggcggggaggugcugagccacucccugcuccugcuucauaaaaaggaagauggaaucuggucuaccgacauucugaaggaucaaaaagagccuaagaacaaaacauuucucagaugugaagcuaagaauuauagcggccgguuuaccugcugguggcugacgaccaucuccacagaccuuaccuucagcguuaaaucuucccgcggcagcucugauccccagggggugacauguggagccgccacccuguccgcugagagaguccggggcgacaacaaggaguacgaauauagcguggagugccaggaagauucugccuguccugcugccgaggaaucccuccccaucgaggugauggucgacgcgguucacaagcugaaauacgagaauuauacgagcuccuucuuuauucgcgacaucauuaagccugauccgcccaaaaaccugcagcucaagccucugaaaaauucuagacaaguggaagugagcugggaguaccccgacacaugguccaccccucauagcuacuucucucuuacauuuugcguccaggugcaggggaaguccaaacgggaaaagaaggaucgcguuuucaccgacaaaaccagcgccacagugaucuguagaaagaacgcuucuauuagcguccgggcccaggaucgcuauuacuccucuagcugguccgagugggcuagcgugcccugcucuggcagcaccuccgggucuggaaagcccggcagcggggagggauccacaaaaggccggaaccugccuguugcgacaccggaucccggcauguucccuugucuccaucacucucagaaucugcugcgcgcugugagcaacaugcuccaaaaggccagacagacgcuggaguuuuaccccugcaccuccgaagagaucgaccaugaagauauuacaaaagacaagaccucuacaguggaggccugucuuccucuggaacucaccaaaaaugagagcugccugaacucccgggagacaucuuucaucaccaaugggagcugucuugcuucccgcaagacgagcuuuaugauggcccugugccucucuuccauuuaugaagaucugaaaauguaccaggucgaguucaagaccaugaacgcuaagcugcucauggaccccaaaagacagaucuuucuggaucaaaauaugcuugccgugauugacgaacugaugcaggcgcucaacuucaauagcgagacaguuccucagaagucuucccuggaggaaccggauuuuuauaaaaccaagaucaaacuuuguauccugcuccacgccuuccggauucgcgcugugacaaucgacagagucaugagcuaccugaacgccucuugaggacuaguuauaagacugacuagcccgaugggccucccaacgggcccuccuccccuccuugcaccgagauuaauaaaaaaaaaaaaaaaaaaaaaaaaaaaaaaaaaaaaaaaaaaaaaaaaaaaaaaaaaaaaaaaaugcaucccccccccccccccccccccccccccccccaaaggcucuuuucagagccaccagaauu

SEQ ID NO: 220 - RNA, 1003 nt, Artificial Sequence
  CD40LG mRNA product opt5
gggagaaagcuuaccaugaucgagaccuacaaccagacaagccccagauccgccgcuacgggccugccuauuucuaugaagaucuucauguaucuccugaccguguuucuuauuacacaaaugaucgggagcgcccuguucgcggucuaccuccaccggcgccuggacaaaauugaagaugagagaaaucuucaugaagacuuuguuuucaugaagaccauccagcggugcaacacaggagagcgcucccugucucuccugaauugugaagagaucaaaagccaguuugagggcuucgugaaggauauuaugcugaacaaagaagagaccaagaaggaaaauuccuuugagaugcagaaaggggaccaaaacccgcagaucgcugcccacgugauuucugaggccagcuccaagacaaccagcguccuccagugggcugaaaaaggauauuacacgaugucuaauaaccuggugacccuugagaauggcaagcagcugacaguuaaaagacaagggcucuauuacaucuaugcccaggugaccuucugcuccaaccgggaagcuagcucucaggcccccuuuauugcgucccugugucuuaagagcccuggacgcuucgagagaauccugcuccgggccgcuaauacacauucuuccgccaagcccugcggccagcaaagcauucaccugggcggggucuuugaacugcagccuggagcuuccguguucguuaacgugaccgaucccucucaggucagccauggcacgggguuuacauccuucggacuccugaaacuuugaggacuaguuauaagacugacuagcccgaugggccucccaacgggcccuccuccccuccuugcaccgagauuaauaaaaaaaaaaaaaaaaaaaaaaaaaaaaaaaaaaaaaaaaaaaaaaaaaaaaaaaaaaaaaaaaugcaucccccccccccccccccccccccccccccccaaaggcucuuuucagagccaccagaauu

SEQ ID NO: 221 - RNA, 1084 nt, Artificial Sequence
  PDCD1 mRNA product opt6
gggagaaagcuuaccaugcaaauaccacaagcaccauggccaguaguaugggcuguacuacaauuagguuggcgaccaggaugguuuuuagacucaccagaucguccauggaacccaccaacauuuucaccagcauuauuaguaguaacagaaggagauaaugcaaccuuuacauguucauucaguaacacaucagaaaguuuuguacuaaauugguauagaaugucaccuucaaaucaaacagauaaauuagcagcauuuccagaagauagaucacaaccaggacaagauugcagauuuagaguaacacaauuaccuaauggacgagacuuucauaugucaguaguaagagcucgacguaacgauucaggaacauacuuauguggagcaauaucauuagcaccaaaagcacaaauaaaagaaucuuuaagagcagaauuaagaguaacagaaagacgcgcagaaguaccaacagcacauccaagcccuucaccacgaccugcaggacaauuucaaacauuaguagucggaguaguaggaggauuauuagguucacugguauuauuaguauggguauuagcaguaauaugcuccagagcagcaagaggaacaauaggagcaagaagaacaggacaaccauuaaaagaagacccaucugcaguaccaguauuuucaguugacuauggagaacuagauuuccaauggagggaaaaaacaccagaaccuccaguuccauguguaccagaacaaacagaauaugcaacaauuguauuucccucaggaaugggaacaucuaguccagcaagaagaggaucagcugauggaccaagaucagcacaaccauuaagaccagaagauggacauuguucauggccauuauaaggacuaguuauaagacugacuagcccgaugggccucccaacgggcccuccuccccuccuugcaccgagauuaauaaaaaaaaaaaaaaaaaaaaaaaaaaaaaaaaaaaaaaaaaaaaaaaaaaaaaaaaaaaaaaaaugcaucccccccccccccccccccccccccccccccaaaggcucuuuucagagccaccagaauu

SEQ ID NO: 222 - RNA, 667 nt, Artificial Sequence
  PDCD1(1-149) mRNA product opt6
gggagaaagcuuaccaugcaaauaccacaagcaccauggccaguaguaugggcuguacuacaauuagguuggcgaccaggaugguuuuuagacucaccagaucguccauggaacccaccaacauuuucaccagcauuauuaguaguaacagaaggagauaaugcaaccuuuacauguucauucaguaacacaucagaaaguuuuguacuaaauugguauagaaugucaccuucaaaucaaacagauaaauuagcagcauuuccagaagauagaucacaaccaggacaagauugcagauuuagaguaacacaauuaccuaauggacgagacuuucauaugucaguaguaagagcucgacguaacgauucaggaacauacuuauguggagcaauaucauuagcaccaaaagcacaaauaaaagaaucuuuaagagcagaauuaagaguaacagaaagacgcgcauaaggacuaguuauaagacugacuagcccgaugggccucccaacgggcccuccuccccuccuugcaccgagauuaauaaaaaaaaaaaaaaaaaaaaaaaaaaaaaaaaaaaaaaaaaaaaaaaaaaaaaaaaaaaaaaaaugcaucccccccccccccccccccccccccccccccaaaggcucuuuucagagccaccagaauu

SEQ ID NO: 223 - RNA, 877 nt, Artificial Sequence
  IL12A mRNA product opt6
gggagaaagcuuaccaugugcccagcaagaucacuacuacugguagcaacacugguacuacuagaccaccuaucacucgccagaaaccucccaguagccacaccagacccaggaauguuccccugccuccaccauucccaaaaccuacuaagagcaguaucaaacaugcuacaaaaagcaagacaaacacuagaguucuauccaugcacaucagaagaaauagaccacgaagacauaacaaaagacaaaacaucaaccguagaagcaugccucccacucgaacucacaaaaaacgaaucaugccuaaacucaagagaaacaucauucauaacaaacggcucaugcuuagccucaagaaaaacaucauucaugauggcacuaugccucucauccauauaugaagacuuaaaaauguaccaaguagaauuuaaaaccaugaacgcaaaauuacuaauggacccaaaaagacaaauauuccuagaccaaaacaugcuagcaguaauagacgaacuaaugcaagcacuaaacuucaacucagaaaccguaccccaaaaaucaucucuagaagaaccagacuucuacaaaacaaaaauaaaacuaugcauacuacuacacgccuucagaauaagagccgucacaauagacagagucaugucauaccuaaacgccucauaaggacuaguuauaagacugacuagcccgaugggccucccaacgggcccuccuccccuccuugcaccgagauuaauaaaaaaaaaaaaaaaaaaaaaaaaaaaaaaaaaaaaaaaaaaaaaaaaaaaaaaaaaaaaaaaaugcaucccccccccccccccccccccccccccccccaaaggcucuuuucagagccaccagaauu

SEQ ID NO: 224 - RNA, 874 nt, Artificial Sequence
  IL12A(1-219) mRNA product opt6
gggagaaagcuuaccaugugcccagcaagaucacuacuacugguagcaacacugguacuacuagaccaccuaucacucgccagaaaccucccaguagccacaccagacccaggaauguuccccugccuccaccauucccaaaaccuacuaagagcaguaucaaacaugcuacaaaaagcaagacaaacacuagaguucuauccaugcacaucagaagaaauagaccacgaagacauaacaaaagacaaaacaucaaccguagaagcaugccucccacucgaacucacaaaaaacgaaucaugccuaaacucaagagaaacaucauucauaacaaacggcucaugcuuagccucaagaaaaacaucauucaugauggcacuaugccucucauccauauaugaagacuuaaaaauguaccaaguagaauuuaaaaccaugaacgcaaaauuacuaauggacccaaaaagacaaauauuccuagaccaaaacaugcuagcaguaauagacgaacuaaugcaagcacuaaacuucaacucagaaaccguaccccaaaaaucaucucuagaagaaccagacuucuacaaaacaaaaauaaaacuaugcauacuacuacacgccuucagaauaagagccgucacaauagacagagucaugucauaccuaaacgccucaggacuaguuauaagacugacuagcccgaugggccucccaacgggcccuccuccccuccuugcaccgagauuaauaaaaaaaaaaaaaaaaaaaaaaaaaaaaaaaaaaaaaaaaaaaaaaaaaaaaaaaaaaaaaaaaugcaucccccccccccccccccccccccccccccccaaaggcucuuuucagagccaccagaauu

SEQ ID NO: 225 - RNA, 811 nt, Artificial Sequence
  IL12A(23-219) mRNA product opt6
gggagaaagcuuaccagaaaccucccaguagccacaccagacccaggaauguuccccugccuccaccauucccaaaaccuacuaagagcaguaucaaacaugcuacaaaaagcaagacaaacacuagaguucuauccaugcacaucagaagaaauagaccacgaagacauaacaaaagacaaaacaucaaccguagaagcaugccucccacucgaacucacaaaaaacgaaucaugccuaaacucaagagaaacaucauucauaacaaacggcucaugcuuagccucaagaaaaacaucauucaugauggcacuaugccucucauccauauaugaagacuuaaaaauguaccaaguagaauuuaaaaccaugaacgcaaaauuacuaauggacccaaaaagacaaauauuccuagaccaaaacaugcuagcaguaauagacgaacuaaugcaagcacuaaacuucaacucagaaaccguaccccaaaaaucaucucuagaagaaccagacuucuacaaaacaaaaauaaaacuaugcauacuacuacacgccuucagaauaagagccgucacaauagacagagucaugucauaccuaaacgccucauaaggacuaguuauaagacugacuagcccgaugggccucccaacgggcccuccuccccuccuugcaccgagauuaauaaaaaaaaaaaaaaaaaaaaaaaaaaaaaaaaaaaaaaaaaaaaaaaaaaaaaaaaaaaaaaaaugcaucccccccccccccccccccccccccccccccaaaggcucuuuucagagccaccagaauu

SEQ ID NO: 226 - RNA, 1204 nt, Artificial Sequence
  IL12B mRNA product opt6
gggagaaagcuuaccaugugccaccaacaacugguaauaucaugguucucacugguauucuuggcaucaccccuaguagcaauaugggaacuaaaaaaagacguauacguaguagaacuagacugguacccagacgcaccaggagaaaugguaguauuaacaugcgacacaccagaagaagauggaauaacuuggacauuagaccaaucaagugaaguauuaggaucaggcaaaacacuaacuauacaaguaaaagaauuuggagacgcaggacaauacacgugccacaaaggaggcgaaguccuaucacauucacuacuauuauuacacaaaaaagaagacggaaucuggagcacagacauauuaaaagaccaaaaagaaccaaaaaacaaaacauuucuaagaugcgaagcuaaaaacuauucaggaagauucacaugcugguggcuaacaaccaucaguaccgacuuaacauucucaguaaaaucaucaagaggaucaucagacccacaaggaguaacauguggagcagcaacacuaagcgcagaaagaguacgaggagacaacaaagaauacgaauauucaguagaaugucaagaagacucagcaugcccugcagcagaagaaucauuaccaauagaaguaauggucgacgcuguacacaaacuaaaauaugaaaauuacacaagcaguuucuucauaagagacauaauaaaacccgacccaccaaaaaaccuacaacuaaaaccauuaaaaaauucaagacaaguagaaguaucaugggaauacccagauacauggagcacaccacacaguuacuucucauuaacauucugcguacaaguacaaggaaaaaguaaaagagaaaaaaaagacagaguauucacagauaagacuucagcaacaguaauaugcagaaaaaacgcaagcauaagcguacgagcacaagacagauauuacucaagcucauggucagaaugggcaucaguaccauguucauaaggacuaguuauaagacugacuagcccgaugggccucccaacgggcccuccuccccuccuugcaccgagauuaauaaaaaaaaaaaaaaaaaaaaaaaaaaaaaaaaaaaaaaaaaaaaaaaaaaaaaaaaaaaaaaaaugcaucccccccccccccccccccccccccccccccaaaggcucuuuucagagccaccagaauu

SEQ ID NO: 227 - RNA, 1201 nt, Artificial Sequence
  IL12B(1-328) mRNA product opt6
gggagaaagcuuaccaugugccaccaacaacugguaauaucaugguucucacugguauucuuggcaucaccccuaguagcaauaugggaacuaaaaaaagacguauacguaguagaacuagacugguacccagacgcaccaggagaaaugguaguauuaacaugcgacacaccagaagaagauggaauaacuuggacauuagaccaaucaagugaaguauuaggaucaggcaaaacacuaacuauacaaguaaaagaauuuggagacgcaggacaauacacgugccacaaaggaggcgaaguccuaucacauucacuacuauuauuacacaaaaaagaagacggaaucuggagcacagacauauuaaaagaccaaaaagaaccaaaaaacaaaacauuucuaagaugcgaagcuaaaaacuauucaggaagauucacaugcugguggcuaacaaccaucaguaccgacuuaacauucucaguaaaaucaucaagaggaucaucagacccacaaggaguaacauguggagcagcaacacuaagcgcagaaagaguacgaggagacaacaaagaauacgaauauucaguagaaugucaagaagacucagcaugcccugcagcagaagaaucauuaccaauagaaguaauggucgacgcuguacacaaacuaaaauaugaaaauuacacaagcaguuucuucauaagagacauaauaaaacccgacccaccaaaaaaccuacaacuaaaaccauuaaaaaauucaagacaaguagaaguaucaugggaauacccagauacauggagcacaccacacaguuacuucucauuaacauucugcguacaaguacaaggaaaaaguaaaagagaaaaaaaagacagaguauucacagauaagacuucagcaacaguaauaugcagaaaaaacgcaagcauaagcguacgagcacaagacagauauuacucaagcucauggucagaaugggcaucaguaccauguucaggacuaguuauaagacugacuagcccgaugggccucccaacgggcccuccuccccuccuugcaccgagauuaauaaaaaaaaaaaaaaaaaaaaaaaaaaaaaaaaaaaaaaaaaaaaaaaaaaaaaaaaaaaaaaaaugcaucccccccccccccccccccccccccccccccaaaggcucuuuucagagccaccagaauu

SEQ ID NO: 228 - RNA, 1138 nt, Artificial Sequence
  IL12B(23-328) mRNA product opt6
gggagaaagcuuaccauaugggaacuaaaaaaagacguauacguaguagaacuagacugguacccagacgcaccaggagaaaugguaguauuaacaugcgacacaccagaagaagauggaauaacuuggacauuagaccaaucaagugaaguauuaggaucaggcaaaacacuaacuauacaaguaaaagaauuuggagacgcaggacaauacacgugccacaaaggaggcgaaguccuaucacauucacuacuauuauuacacaaaaaagaagacggaaucuggagcacagacauauuaaaagaccaaaaagaaccaaaaaacaaaacauuucuaagaugcgaagcuaaaaacuauucaggaagauucacaugcugguggcuaacaaccaucaguaccgacuuaacauucucaguaaaaucaucaagaggaucaucagacccacaaggaguaacauguggagcagcaacacuaagcgcagaaagaguacgaggagacaacaaagaauacgaauauucaguagaaugucaagaagacucagcaugcccugcagcagaagaaucauuaccaauagaaguaauggucgacgcuguacacaaacuaaaauaugaaaauuacacaagcaguuucuucauaagagacauaauaaaacccgacccaccaaaaaaccuacaacuaaaaccauuaaaaaauucaagacaaguagaaguaucaugggaauacccagauacauggagcacaccacacaguuacuucucauuaacauucugcguacaaguacaaggaaaaaguaaaagagaaaaaaaagacagaguauucacagauaagacuucagcaacaguaauaugcagaaaaaacgcaagcauaagcguacgagcacaagacagauauuacucaagcucauggucagaaugggcaucaguaccauguucauaaggacuaguuauaagacugacuagcccgaugggccucccaacgggcccuccuccccuccuugcaccgagauuaauaaaaaaaaaaaaaaaaaaaaaaaaaaaaaaaaaaaaaaaaaaaaaaaaaaaaaaaaaaaaaaaaugcaucccccccccccccccccccccccccccccccaaaggcucuuuucagagccaccagaauu

SEQ ID NO: 229 - RNA, 271 nt, Artificial Sequence
  Linker-sFvCC49-218 mRNA product opt6
gggagaaagcuuaccggaaguacaaguggaaguggaaaaccaggaaguggagaaggaaguacaaaaggaggacuaguuauaagacugacuagcccgaugggccucccaacgggcccuccuccccuccuugcaccgagauuaauaaaaaaaaaaaaaaaaaaaaaaaaaaaaaaaaaaaaaaaaaaaaaaaaaaaaaaaaaaaaaaaaugcaucccccccccccccccccccccccccccccccaaaggcucuuuucagagccaccagaauu

SEQ ID NO: 230 - RNA, 1849 nt, Artificial Sequence
  IL12 mRNA product opt6
gggagaaagcuuaccaugugccaccaacaacugguaauaucaugguucucacugguauucuuggcaucaccccuaguagcaauaugggaacuaaaaaaagacguauacguaguagaacuagacugguacccagacgcaccaggagaaaugguaguauuaacaugcgacacaccagaagaagauggaauaacuuggacauuagaccaaucaagugaaguauuaggaucaggcaaaacacuaacuauacaaguaaaagaauuuggagacgcaggacaauacacgugccacaaaggaggcgaaguccuaucacauucacuacuauuauuacacaaaaaagaagacggaaucuggagcacagacauauuaaaagaccaaaaagaaccaaaaaacaaaacauuucuaagaugcgaagcuaaaaacuauucaggaagauucacaugcugguggcuaacaaccaucaguaccgacuuaacauucucaguaaaaucaucaagaggaucaucagacccacaaggaguaacauguggagcagcaacacuaagcgcagaaagaguacgaggagacaacaaagaauacgaauauucaguagaaugucaagaagacucagcaugcccugcagcagaagaaucauuaccaauagaaguaauggucgacgcuguacacaaacuaaaauaugaaaauuacacaagcaguuucuucauaagagacauaauaaaacccgacccaccaaaaaaccuacaacuaaaaccauuaaaaaauucaagacaaguagaaguaucaugggaauacccagauacauggagcacaccacacaguuacuucucauuaacauucugcguacaaguacaaggaaaaaguaaaagagaaaaaaaagacagaguauucacagauaagacuucagcaacaguaauaugcagaaaaaacgcaagcauaagcguacgagcacaagacagauauuacucaagcucauggucagaaugggcaucaguaccauguucaggaaguacaaguggaaguggaaaaccaggaaguggagaaggaaguacaaaaggaagaaaccucccaguagccacaccagacccaggaauguuccccugccuccaccauucccaaaaccuacuaagagcaguaucaaacaugcuacaaaaagcaagacaaacacuagaguucuauccaugcacaucagaagaaauagaccacgaagacauaacaaaagacaaaacaucaaccguagaagcaugccucccacucgaacucacaaaaaacgaaucaugccuaaacucaagagaaacaucauucauaacaaacggcucaugcuuagccucaagaaaaacaucauucaugauggcacuaugccucucauccauauaugaagacuuaaaaauguaccaaguagaauuuaaaaccaugaacgcaaaauuacuaauggacccaaaaagacaaauauuccuagaccaaaacaugcuagcaguaauagacgaacuaaugcaagcacuaaacuucaacucagaaaccguaccccaaaaaucaucucuagaagaaccagacuucuacaaaacaaaaauaaaacuaugcauacuacuacacgccuucagaauaagagccgucacaauagacagagucaugucauaccuaaacgccucauaaggacuaguuauaagacugacuagcccgaugggccucccaacgggcccuccuccccuccuugcaccgagauuaauaaaaaaaaaaaaaaaaaaaaaaaaaaaaaaaaaaaaaaaaaaaaaaaaaaaaaaaaaaaaaaaaugcaucccccccccccccccccccccccccccccccaaaggcucuuuucagagccaccagaauu

SEQ ID NO: 231 - RNA, 1003 nt, Artificial Sequence
  CD40LG mRNA product opt6
gggagaaagcuuaccaugauagaaacauauaaucaaacaagcccaagaucagcagcaacaggacuaccaauaucaaugaaaauauucauguaccuacucacagucuuccuaauaacacaaaugauaggaucugcccuauuugcaguauaccuacacagaagacuagauaaaauagaagacgaaagaaaccuacaugaagacuucguauucaugaaaacaauacaaagaugcaacaccggagaaagaucccuaucacuacuaaacugcgaagaaauaaaaucacaauucgaaggauucguaaaagacauaaugcuaaacaaagaagaaacaaaaaaagaaaacucuuucgaaaugcaaaaaggagaccaaaacccacaaauagcugcacacgucauaucagaagcaucaucaaaaacaacaucaguacuucaaugggcagaaaaaggauacuauacaaugucaaacaaucuaguaacccuagaaaacggaaaacaacuaacaguaaaaagacaaggacuauacuauauauacgcacaaguaacauucugcucaaacagagaagcaucaucacaagcaccauucaucgcaucacuaugccuaaaauccccaggaagauucgaacgaauccuacuaagagcagcaaacacacacucaucagcaaaaccaugcggccaacaaucaauacaccuaggaggaguauucgaacuacaaccaggagcaucaguauucguaaacguaacagaccccucacaaguaagccacggcacaggauucacaucauuuggacuauuaaaauuauaaggacuaguuauaagacugacuagcccgaugggccucccaacgggcccuccuccccuccuugcaccgagauuaauaaaaaaaaaaaaaaaaaaaaaaaaaaaaaaaaaaaaaaaaaaaaaaaaaaaaaaaaaaaaaaaaugcaucccccccccccccccccccccccccccccccaaaggcucuuuucagagccaccagaauu

SEQ ID NO: 232 - RNA, 1084 nt, Artificial Sequence
  PDCD1 mRNA product opt7
gggagaaagcuuaccaugcagaucccccaagccccauggccgguggucugggcagugcugcagcucggcuggaggcccgggugguuccuggacagcccagaucggcccuggaacccacccaccuuuuccccagccuugcugguagugacugagggugacaaugcgaccuucacgugcaguuuuagcaacacuuccgaaaguuucguccucaauugguaccgcaugagcccguccaaccagaccgauaagcuggccgcauuucccgaggacaggagccagccaggccaagauugucgguuccgcgugacccaguugcccaaugggagggacuuucacauguccgugguccgggcccgcaggaacgauaguggcacuuaucugugcggugcaauuagccucgccccaaaagcgcagaucaaggaaucccugcgggccgagcugcgcgugaccgaaaggcgggcagagguacccacggcccauccgagccccaguccacgccccgccgggcaguuccaaacucucguggucggcguggugggcgggcuguuggguucccugguccuccugguguggguacuggcagugauuuguagcagggccgcgcggggcaccaucggggcccgcaggacuggccagccauugaaagaggaccccuccgcagucccaguguuuaguguggauuacggugaacucgacuuccaguggcgggagaagaccccggaacccccaguccccugcgugccagagcagaccgaguaugccacgauuguauuucccagcgggaugggcacuuccagcccggcacgcaggggcagugccgaugggccacgguccgcccaaccccugaggcccgaagacggucacuguagcuggccacugugaggacuaguuauaagacugacuagcccgaugggccucccaacgggcccuccuccccuccuugcaccgagauuaauaaaaaaaaaaaaaaaaaaaaaaaaaaaaaaaaaaaaaaaaaaaaaaaaaaaaaaaaaaaaaaaaugcaucccccccccccccccccccccccccccccccaaaggcucuuuucagagccaccagaauu

SEQ ID NO: 233 - RNA, 667 nt, Artificial Sequence
  PDCD1(1-149) mRNA product opt7
gggagaaagcuuaccaugcagaucccccaagccccauggccgguggucugggcagugcugcagcucggcuggaggcccgggugguuccuggacagcccagaucggcccuggaacccacccaccuuuuccccagccuugcugguagugacugagggugacaaugcgaccuucacgugcaguuuuagcaacacuuccgaaaguuucguccucaauugguaccgcaugagcccguccaaccagaccgauaagcuggccgcauuucccgaggacaggagccagccaggccaagauugucgguuccgcgugacccaguugcccaaugggagggacuuucacauguccgugguccgggcccgcaggaacgauaguggcacuuaucugugcggugcaauuagccucgccccaaaagcgcagaucaaggaaucccugcgggccgagcugcgcgugaccgaaaggcgggcaugaggacuaguuauaagacugacuagcccgaugggccucccaacgggcccuccuccccuccuugcaccgagauuaauaaaaaaaaaaaaaaaaaaaaaaaaaaaaaaaaaaaaaaaaaaaaaaaaaaaaaaaaaaaaaaaaugcaucccccccccccccccccccccccccccccccaaaggcucuuuucagagccaccagaauu

SEQ ID NO: 234 - RNA, 877 nt, Artificial Sequence
  IL12A mRNA product opt7
gggagaaagcuuaccaugugccccgccaggagccugcuccugguggcaaccuugguccugcucgaccaccuguccuuggcccggaaccugccaguggcgacuccggaucccggcauguucccaugucuccaucacagucagaaucugcugcgcgccguaagcaacaugcuccaaaaggcaaggcagacccuggaguuuuaccccugcacguccgaagagaucgaccaugaagauauuacuaaagacaagaccaguaccguggaggccuguuugccacuggaacucacuaaaaaugagagcugccugaacucccgggagaccagcuucaucacgaauggguccugucuggcaagucgcaagacuagcuuuaugauggccuugugccucuccagcauuuaugaagaucugaaaauguaccaggucgaguucaagaccaugaacgcgaagcugcucauggaccccaaaaggcagaucuuucuggaucaaaauauguuggccgugauugacgaacugaugcaggcacucaacuucaauagugagacugugccacagaaguccagccuggaggaaccggauuuuuauaaaaccaagaucaaacuguguaucuugcuccacgccuuccggauucgcgccgucaccaucgacagggugauguccuaccugaacgcaaguugaggacuaguuauaagacugacuagcccgaugggccucccaacgggcccuccuccccuccuugcaccgagauuaauaaaaaaaaaaaaaaaaaaaaaaaaaaaaaaaaaaaaaaaaaaaaaaaaaaaaaaaaaaaaaaaaugcaucccccccccccccccccccccccccccccccaaaggcucuuuucagagccaccagaauu

SEQ ID NO: 235 - RNA, 874 nt, Artificial Sequence
  IL12A(1-219) mRNA product opt7
gggagaaagcuuaccaugugccccgccaggagccugcuccugguggcaaccuugguccugcucgaccaccuguccuuggcccggaaccugccaguggcgacuccggaucccggcauguucccaugucuccaucacagucagaaucugcugcgcgccguaagcaacaugcuccaaaaggcaaggcagacccuggaguuuuaccccugcacguccgaagagaucgaccaugaagauauuacuaaagacaagaccaguaccguggaggccuguuugccacuggaacucacuaaaaaugagagcugccugaacucccgggagaccagcuucaucacgaauggguccugucuggcaagucgcaagacuagcuuuaugauggccuugugccucuccagcauuuaugaagaucugaaaauguaccaggucgaguucaagaccaugaacgcgaagcugcucauggaccccaaaaggcagaucuuucuggaucaaaauauguuggccgugauugacgaacugaugcaggcacucaacuucaauagugagacugugccacagaaguccagccuggaggaaccggauuuuuauaaaaccaagaucaaacuguguaucuugcuccacgccuuccggauucgcgccgucaccaucgacagggugauguccuaccugaacgcaaguggacuaguuauaagacugacuagcccgaugggccucccaacgggcccuccuccccuccuugcaccgagauuaauaaaaaaaaaaaaaaaaaaaaaaaaaaaaaaaaaaaaaaaaaaaaaaaaaaaaaaaaaaaaaaaaugcaucccccccccccccccccccccccccccccccaaaggcucuuuucagagccaccagaauu

SEQ ID NO: 236 - RNA, 811 nt, Artificial Sequence
  IL12A(23-219) mRNA product opt7
gggagaaagcuuacccggaaccugccaguggcgacuccggaucccggcauguucccaugucuccaucacagucagaaucugcugcgcgccguaagcaacaugcuccaaaaggcaaggcagacccuggaguuuuaccccugcacguccgaagagaucgaccaugaagauauuacuaaagacaagaccaguaccguggaggccuguuugccacuggaacucacuaaaaaugagagcugccugaacucccgggagaccagcuucaucacgaauggguccugucuggcaagucgcaagacuagcuuuaugauggccuugugccucuccagcauuuaugaagaucugaaaauguaccaggucgaguucaagaccaugaacgcgaagcugcucauggaccccaaaaggcagaucuuucuggaucaaaauauguuggccgugauugacgaacugaugcaggcacucaacuucaauagugagacugugccacagaaguccagccuggaggaaccggauuuuuauaaaaccaagaucaaacuguguaucuugcuccacgccuuccggauucgcgccgucaccaucgacagggugauguccuaccugaacgcaaguugaggacuaguuauaagacugacuagcccgaugggccucccaacgggcccuccuccccuccuugcaccgagauuaauaaaaaaaaaaaaaaaaaaaaaaaaaaaaaaaaaaaaaaaaaaaaaaaaaaaaaaaaaaaaaaaaugcaucccccccccccccccccccccccccccccccaaaggcucuuuucagagccaccagaauu

SEQ ID NO: 237 - RNA, 1204 nt, Artificial Sequence
  IL12B mRNA product opt7
gggagaaagcuuaccaugugccaccagcaacuggugaucagcugguucucccucgucuuucuggccagucccuugguggcaauuugggagcugaagaaagacguauacguggucgaacucgauugguauccagacgccccgggcgagaugguggugcugaccugugauacucccgaagaggacgggaucaccuggacguuggaucagagcuccgaaguccuggguaguggcaagacucucaccauucaggugaaagaguucggggacgcgggccaguauaccugccauaaggguggggagguacugagccacucccugcuccuguugcauaaaaaggaagauggcaucuggagcacugacauucugaaggaucaaaaagagccaaagaacaaaaccuuucucaggugugaagccaagaauuacuccggccgguucacgugcugguggcugacuaccaucaguacugaccugaccuuuagcgugaaauccagccgcgggaguuccgauccccagggugucaccuguggcgcagccacguugagcgcagagagggugcgcggggacaacaaggaguacgaauauuccguggagugccaggaagauagugccuguccagcggccgaggaaagccuccccaucgaggucaugguggacgcaguacacaaacugaaguacgagaauuauacuuccagcuucuuuauucgggacaucauuaagccagauccgcccaaaaaccugcagcucaagccacugaaaaauaguaggcaaguggaagucuccugggaguaccccgacaccuggagcacuccacauaguuacuucuccuugaccuuuugcguccaggugcagggcaagagcaaacgggaaaagaaggaucgcguguucaccgacaaaacuagcgccacggugaucuguaggaagaacgccuccauuaguguacgggcacaggaucgcuauuacagcuccagcuggagugagugggccuccgugcccugcagcugaggacuaguuauaagacugacuagcccgaugggccucccaacgggcccuccuccccuccuugcaccgagauuaauaaaaaaaaaaaaaaaaaaaaaaaaaaaaaaaaaaaaaaaaaaaaaaaaaaaaaaaaaaaaaaaaugcaucccccccccccccccccccccccccccccccaaaggcucuuuucagagccaccagaauu

SEQ ID NO: 238 - RNA, 1201 nt, Artificial Sequence
  IL12B(1-328) mRNA product opt7
gggagaaagcuuaccaugugccaccagcaacuggugaucagcugguucucccucgucuuucuggccagucccuugguggcaauuugggagcugaagaaagacguauacguggucgaacucgauugguauccagacgccccgggcgagaugguggugcugaccugugauacucccgaagaggacgggaucaccuggacguuggaucagagcuccgaaguccuggguaguggcaagacucucaccauucaggugaaagaguucggggacgcgggccaguauaccugccauaaggguggggagguacugagccacucccugcuccuguugcauaaaaaggaagauggcaucuggagcacugacauucugaaggaucaaaaagagccaaagaacaaaaccuuucucaggugugaagccaagaauuacuccggccgguucacgugcugguggcugacuaccaucaguacugaccugaccuuuagcgugaaauccagccgcgggaguuccgauccccagggugucaccuguggcgcagccacguugagcgcagagagggugcgcggggacaacaaggaguacgaauauuccguggagugccaggaagauagugccuguccagcggccgaggaaagccuccccaucgaggucaugguggacgcaguacacaaacugaaguacgagaauuauacuuccagcuucuuuauucgggacaucauuaagccagauccgcccaaaaaccugcagcucaagccacugaaaaauaguaggcaaguggaagucuccugggaguaccccgacaccuggagcacuccacauaguuacuucuccuugaccuuuugcguccaggugcagggcaagagcaaacgggaaaagaaggaucgcguguucaccgacaaaacuagcgccacggugaucuguaggaagaacgccuccauuaguguacgggcacaggaucgcuauuacagcuccagcuggagugagugggccuccgugcccugcagcggacuaguuauaagacugacuagcccgaugggccucccaacgggcccuccuccccuccuugcaccgagauuaauaaaaaaaaaaaaaaaaaaaaaaaaaaaaaaaaaaaaaaaaaaaaaaaaaaaaaaaaaaaaaaaaugcaucccccccccccccccccccccccccccccccaaaggcucuuuucagagccaccagaauu

SEQ ID NO: 239 - RNA, 1138 nt, Artificial Sequence
  IL12B(23-328) mRNA product opt7
gggagaaagcuuaccauuugggagcugaagaaagacguauacguggucgaacucgauugguauccagacgccccgggcgagaugguggugcugaccugugauacucccgaagaggacgggaucaccuggacguuggaucagagcuccgaaguccuggguaguggcaagacucucaccauucaggugaaagaguucggggacgcgggccaguauaccugccauaaggguggggagguacugagccacucccugcuccuguugcauaaaaaggaagauggcaucuggagcacugacauucugaaggaucaaaaagagccaaagaacaaaaccuuucucaggugugaagccaagaauuacuccggccgguucacgugcugguggcugacuaccaucaguacugaccugaccuuuagcgugaaauccagccgcgggaguuccgauccccagggugucaccuguggcgcagccacguugagcgcagagagggugcgcggggacaacaaggaguacgaauauuccguggagugccaggaagauagugccuguccagcggccgaggaaagccuccccaucgaggucaugguggacgcaguacacaaacugaaguacgagaauuauacuuccagcuucuuuauucgggacaucauuaagccagauccgcccaaaaaccugcagcucaagccacugaaaaauaguaggcaaguggaagucuccugggaguaccccgacaccuggagcacuccacauaguuacuucuccuugaccuuuugcguccaggugcagggcaagagcaaacgggaaaagaaggaucgcguguucaccgacaaaacuagcgccacggugaucuguaggaagaacgccuccauuaguguacgggcacaggaucgcuauuacagcuccagcuggagugagugggccuccgugcccugcagcugaggacuaguuauaagacugacuagcccgaugggccucccaacgggcccuccuccccuccuugcaccgagauuaauaaaaaaaaaaaaaaaaaaaaaaaaaaaaaaaaaaaaaaaaaaaaaaaaaaaaaaaaaaaaaaaaugcaucccccccccccccccccccccccccccccccaaaggcucuuuucagagccaccagaauu

SEQ ID NO: 240 - RNA, 271 nt, Artificial Sequence
  Linker-sFvCC49-218 mRNA product opt7
gggagaaagcuuaccggcagcaccuccgggagugguaagcccggcagcggggagggcuccacuaaagguggacuaguuauaagacugacuagcccgaugggccucccaacgggcccuccuccccuccuugcaccgagauuaauaaaaaaaaaaaaaaaaaaaaaaaaaaaaaaaaaaaaaaaaaaaaaaaaaaaaaaaaaaaaaaaaugcaucccccccccccccccccccccccccccccccaaaggcucuuuucagagccaccagaauu

SEQ ID NO: 241 - RNA, 1849 nt, Artificial Sequence
  IL12 mRNA product opt7
gggagaaagcuuaccaugugccaccagcaacuggugaucagcugguucucccucgucuuucuggccagucccuugguggcaauuugggagcugaagaaagacguauacguggucgaacucgauugguauccagacgccccgggcgagaugguggugcugaccugugauacucccgaagaggacgggaucaccuggacguuggaucagagcuccgaaguccuggguaguggcaagacucucaccauucaggugaaagaguucggggacgcgggccaguauaccugccauaaggguggggagguacugagccacucccugcuccuguugcauaaaaaggaagauggcaucuggagcacugacauucugaaggaucaaaaagagccaaagaacaaaaccuuucucaggugugaagccaagaauuacuccggccgguucacgugcugguggcugacuaccaucaguacugaccugaccuuuagcgugaaauccagccgcgggaguuccgauccccagggugucaccuguggcgcagccacguugagcgcagagagggugcgcggggacaacaaggaguacgaauauuccguggagugccaggaagauagugccuguccagcggccgaggaaagccuccccaucgaggucaugguggacgcaguacacaaacugaaguacgagaauuauacuuccagcuucuuuauucgggacaucauuaagccagauccgcccaaaaaccugcagcucaagccacugaaaaauaguaggcaaguggaagucuccugggaguaccccgacaccuggagcacuccacauaguuacuucuccuugaccuuuugcguccaggugcagggcaagagcaaacgggaaaagaaggaucgcguguucaccgacaaaacuagcgccacggugaucuguaggaagaacgccuccauuaguguacgggcacaggaucgcuauuacagcuccagcuggagugagugggccuccgugcccugcagcggcagcaccuccgggagugguaagcccggcagcggggagggcuccacuaaaggucggaaccugccaguggcgacuccggaucccggcauguucccaugucuccaucacagucagaaucugcugcgcgccguaagcaacaugcuccaaaaggcaaggcagacccuggaguuuuaccccugcacguccgaagagaucgaccaugaagauauuacuaaagacaagaccaguaccguggaggccuguuugccacuggaacucacuaaaaaugagagcugccugaacucccgggagaccagcuucaucacgaauggguccugucuggcaagucgcaagacuagcuuuaugauggccuugugccucuccagcauuuaugaagaucugaaaauguaccaggucgaguucaagaccaugaacgcgaagcugcucauggaccccaaaaggcagaucuuucuggaucaaaauauguuggccgugauugacgaacugaugcaggcacucaacuucaauagugagacugugccacagaaguccagccuggaggaaccggauuuuuauaaaaccaagaucaaacuguguaucuugcuccacgccuuccggauucgcgccgucaccaucgacagggugauguccuaccugaacgcaaguugaggacuaguuauaagacugacuagcccgaugggccucccaacgggcccuccuccccuccuugcaccgagauuaauaaaaaaaaaaaaaaaaaaaaaaaaaaaaaaaaaaaaaaaaaaaaaaaaaaaaaaaaaaaaaaaaugcaucccccccccccccccccccccccccccccccaaaggcucuuuucagagccaccagaauu

SEQ ID NO: 242 - RNA, 1003 nt, Artificial Sequence
  CD40LG mRNA product opt7
gggagaaagcuuaccaugaucgagaccuacaaccagacuagccccagguccgccgcaaccggccugccaauuaguaugaagaucuucauguaucuccugacgguguuuuugauuacucaaaugaucgggagcgcccuguucgcggucuaccuccaccggcgccuggacaaaauugaagaugagaggaauuugcaugaagacuuuguguucaugaagaccauccagcggugcaacaccggugagcgcucccugagucuccugaauugugaagagaucaaaagccaguuugagggcuucguaaaggauauuaugcugaacaaagaagagacuaagaaggaaaauuccuuugagaugcagaaaggggaccaaaacccgcagaucgccgcacacgugauuagcgaggccuccaguaagaccacgagcguccuccagugggcagaaaaaggcuauuacacuauguccaauaaccuggugaccuuggagaaugguaagcagcugacugugaaaaggcaagggcucuauuacaucuaugcccaggucaccuucugcagcaaccgggaagcgaguucccaggcccccuuuauugcaagccugugucugaaguccccaggccgcuucgagaggaucuugcuccgggccgccaauacccauaguagcgcaaaacccugcggccagcaauccauucaccucggggguguguuugaacugcagccaggcgccagcguauucgugaacgucacggaucccagucaggugucccaugggacuggcuucaccagcuuuggucugcugaaguugugaggacuaguuauaagacugacuagcccgaugggccucccaacgggcccuccuccccuccuugcaccgagauuaauaaaaaaaaaaaaaaaaaaaaaaaaaaaaaaaaaaaaaaaaaaaaaaaaaaaaaaaaaaaaaaaaugcaucccccccccccccccccccccccccccccccaaaggcucuuuucagagccaccagaauu

SEQ ID NO: 243 - RNA, 1084 nt, Artificial Sequence
  PDCD1 mRNA product opt8
gggagaaagcuuaccaugcaaaucccacaagcccccuggcccguagucugggccguacuacaacuaggcuggagacccggcugguuucucgacagccccgaccgacccuggaacccccccaccuucucacccgcccuccucgucgucaccgaaggcgacaacgccacauucacaugcuccuucuccaacaccucugaaucauucguccuaaacugguaccgaaugucacccuccaaccaaacugacaaacucgccgccuuucccgaagaccgcucccaacccggccaagacugccgauuccgagucacacaacuuccuaacggcagagacuuccacauguccguaguccgagcccgccgaaacgacuccggaaccuaccucugcggagccaucucccucgcccccaaagcccaaaucaaagaaucccuccgagcagaacuccgcgucaccgaacgccgcgccgaaguccccaccgcacacccaucacccuccccccgccccgccggccaauuccaaacacuuguaguaggcgucgucggcggccuccuuggaucacucguccuacuuguauggguccuagccgucaucugcucucgcgccgcacgcggcaccaucggcgcacgacgaaccggccaaccucuaaaagaagaccccuccgcaguccccgucuucuccgucgacuacggcgaacucgacuuccaauggcgcgaaaaaacccccgaacccccaguccccugcguacccgaacaaaccgaauacgcaacaaucguauuccccucaggaaugggcaccucaucccccgcccgacgaggaucagccgacggcccacgauccgcccaaccccuccgaccagaagacggccacugcucauggccccuuuaaggacuaguuauaagacugacuagcccgaugggccucccaacgggcccuccuccccuccuugcaccgagauuaauaaaaaaaaaaaaaaaaaaaaaaaaaaaaaaaaaaaaaaaaaaaaaaaaaaaaaaaaaaaaaaaaugcaucccccccccccccccccccccccccccccccaaaggcucuuuucagagccaccagaauu

SEQ ID NO: 244 - RNA, 667 nt, Artificial Sequence
  PDCD1(1-149) mRNA product opt8
gggagaaagcuuaccaugcaaaucccacaagcccccuggcccguagucugggccguacuacaacuaggcuggagacccggcugguuucucgacagccccgaccgacccuggaacccccccaccuucucacccgcccuccucgucgucaccgaaggcgacaacgccacauucacaugcuccuucuccaacaccucugaaucauucguccuaaacugguaccgaaugucacccuccaaccaaacugacaaacucgccgccuuucccgaagaccgcucccaacccggccaagacugccgauuccgagucacacaacuuccuaacggcagagacuuccacauguccguaguccgagcccgccgaaacgacuccggaaccuaccucugcggagccaucucccucgcccccaaagcccaaaucaaagaaucccuccgagcagaacuccgcgucaccgaacgccgcgccuaaggacuaguuauaagacugacuagcccgaugggccucccaacgggcccuccuccccuccuugcaccgagauuaauaaaaaaaaaaaaaaaaaaaaaaaaaaaaaaaaaaaaaaaaaaaaaaaaaaaaaaaaaaaaaaaaugcaucccccccccccccccccccccccccccccccaaaggcucuuuucagagccaccagaauu

SEQ ID NO: 245 - RNA, 877 nt, Artificial Sequence
  IL12A mRNA product opt8
gggagaaagcuuaccaugugccccgccagaucccuccuacucgucgcaacacuuguccuccucgaccaccucucccucgcccgcaaucuccccgucgccacccccgaccccggaauguuucccugccuccaccacucacaaaaccuccuacgcgccgucucaaacaugcuucaaaaagcccgacaaacccucgaauuuuaccccugcaccuccgaagaaaucgaccacgaagacauaaccaaagacaaaaccuccaccgucgaagccugccuaccauuagaacuaaccaaaaacgaauccugccucaacucacgcgaaaccuccuucaucacaaacggcucaugccucgccucacgcaaaaccuccuucaugauggcccucugccuaucaucaaucuaugaagaccucaaaauguaccaaguagaauuuaaaaccaugaacgccaaacuccucauggaccccaaacgccaaaucuuccucgaccaaaacaugcucgcagucaucgacgaacucaugcaagcccucaacuucaacucagaaacagucccacaaaaauccucccucgaagaacccgacuucuauaaaaccaaaaucaaacucugcauccuccuccacgccuuccgcauacgcgccguaaccaucgaccgcguaaugucauaccuaaaugccucuuaaggacuaguuauaagacugacuagcccgaugggccucccaacgggcccuccuccccuccuugcaccgagauuaauaaaaaaaaaaaaaaaaaaaaaaaaaaaaaaaaaaaaaaaaaaaaaaaaaaaaaaaaaaaaaaaaugcaucccccccccccccccccccccccccccccccaaaggcucuuuucagagccaccagaauu

SEQ ID NO: 246 - RNA, 874 nt, Artificial Sequence
  IL12A(1-219) mRNA product opt8
gggagaaagcuuaccaugugccccgccagaucccuccuacucgucgcaacacuuguccuccucgaccaccucucccucgcccgcaaucuccccgucgccacccccgaccccggaauguuucccugccuccaccacucacaaaaccuccuacgcgccgucucaaacaugcuucaaaaagcccgacaaacccucgaauuuuaccccugcaccuccgaagaaaucgaccacgaagacauaaccaaagacaaaaccuccaccgucgaagccugccuaccauuagaacuaaccaaaaacgaauccugccucaacucacgcgaaaccuccuucaucacaaacggcucaugccucgccucacgcaaaaccuccuucaugauggcccucugccuaucaucaaucuaugaagaccucaaaauguaccaaguagaauuuaaaaccaugaacgccaaacuccucauggaccccaaacgccaaaucuuccucgaccaaaacaugcucgcagucaucgacgaacucaugcaagcccucaacuucaacucagaaacagucccacaaaaauccucccucgaagaacccgacuucuauaaaaccaaaaucaaacucugcauccuccuccacgccuuccgcauacgcgccguaaccaucgaccgcguaaugucauaccuaaaugccucuggacuaguuauaagacugacuagcccgaugggccucccaacgggcccuccuccccuccuugcaccgagauuaauaaaaaaaaaaaaaaaaaaaaaaaaaaaaaaaaaaaaaaaaaaaaaaaaaaaaaaaaaaaaaaaaugcaucccccccccccccccccccccccccccccccaaaggcucuuuucagagccaccagaauu

SEQ ID NO: 247 - RNA, 811 nt, Artificial Sequence
  IL12A(23-219) mRNA product opt8
gggagaaagcuuacccgcaaucuccccgucgccacccccgaccccggaauguuucccugccuccaccacucacaaaaccuccuacgcgccgucucaaacaugcuucaaaaagcccgacaaacccucgaauuuuaccccugcaccuccgaagaaaucgaccacgaagacauaaccaaagacaaaaccuccaccgucgaagccugccuaccauuagaacuaaccaaaaacgaauccugccucaacucacgcgaaaccuccuucaucacaaacggcucaugccucgccucacgcaaaaccuccuucaugauggcccucugccuaucaucaaucuaugaagaccucaaaauguaccaaguagaauuuaaaaccaugaacgccaaacuccucauggaccccaaacgccaaaucuuccucgaccaaaacaugcucgcagucaucgacgaacucaugcaagcccucaacuucaacucagaaacagucccacaaaaauccucccucgaagaacccgacuucuauaaaaccaaaaucaaacucugcauccuccuccacgccuuccgcauacgcgccguaaccaucgaccgcguaaugucauaccuaaaugccucuuaaggacuaguuauaagacugacuagcccgaugggccucccaacgggcccuccuccccuccuugcaccgagauuaauaaaaaaaaaaaaaaaaaaaaaaaaaaaaaaaaaaaaaaaaaaaaaaaaaaaaaaaaaaaaaaaaugcaucccccccccccccccccccccccccccccccaaaggcucuuuucagagccaccagaauu

SEQ ID NO: 248 - RNA, 1204 nt, Artificial Sequence
  IL12B mRNA product opt8
gggagaaagcuuaccaugugccaccaacaacucgucauaagcugguucagccuaguauuccucgccucaccccucgucgccaucugggaacucaagaaagacguauacgucgucgaacuagacugguaccccgacgcacccggagaaaugguaguacucacaugcgacacccccgaagaagacggcaucacauggaccuuagaccaaucaucagaaguccucggauccggaaaaacccucacaauccaagucaaagaguucggcgacgccggccaauacacaugccacaaaggcggagaaguccucucacacucacuccuucuacuacacaagaaagaagacggcaucugguccaccgacauacucaaagaccaaaaagaacccaaaaacaaaaccuuccuccgcugcgaagccaaaaacuacuccggccgauucacaugcugguggcucaccaccaucuccaccgaccugaccuucuccgucaaauccagcaggggcuccucagacccacaaggcguaaccugcggcgcagccacccuaucggccgaacgaguccgcggagacaacaaagaauacgaauacagcgucgaaugccaagaagacucagcaugcccagcagccgaagaaucacuccccaucgaagucauggucgacgccguccacaaacuaaaauacgaaaacuacacaagcucauucuucauccgcgacauaaucaaacccgacccaccgaaaaaccuccaacucaaaccccuuaaaaacagccgccaagucgaagucuccugggaauaccccgacaccugguccacaccccacuccuacuucucacucaccuucugcguccaaguccaaggcaaauccaaacgcgaaaagaaagaccgcguauucaccgacaaaaccuccgccacagucaucugccgcaaaaacgccucaaucuccguccgcgcccaagaccgauacuacagcuccuccuggucagaaugggccuccgucccaugcuccuaaggacuaguuauaagacugacuagcccgaugggccucccaacgggcccuccuccccuccuugcaccgagauuaauaaaaaaaaaaaaaaaaaaaaaaaaaaaaaaaaaaaaaaaaaaaaaaaaaaaaaaaaaaaaaaaaugcaucccccccccccccccccccccccccccccccaaaggcucuuuucagagccaccagaauu

SEQ ID NO: 249 - RNA, 1201 nt, Artificial Sequence
  IL12B(1-328) mRNA product opt8
gggagaaagcuuaccaugugccaccaacaacucgucauaagcugguucagccuaguauuccucgccucaccccucgucgccaucugggaacucaagaaagacguauacgucgucgaacuagacugguaccccgacgcacccggagaaaugguaguacucacaugcgacacccccgaagaagacggcaucacauggaccuuagaccaaucaucagaaguccucggauccggaaaaacccucacaauccaagucaaagaguucggcgacgccggccaauacacaugccacaaaggcggagaaguccucucacacucacuccuucuacuacacaagaaagaagacggcaucugguccaccgacauacucaaagaccaaaaagaacccaaaaacaaaaccuuccuccgcugcgaagccaaaaacuacuccggccgauucacaugcugguggcucaccaccaucuccaccgaccugaccuucuccgucaaauccagcaggggcuccucagacccacaaggcguaaccugcggcgcagccacccuaucggccgaacgaguccgcggagacaacaaagaauacgaauacagcgucgaaugccaagaagacucagcaugcccagcagccgaagaaucacuccccaucgaagucauggucgacgccguccacaaacuaaaauacgaaaacuacacaagcucauucuucauccgcgacauaaucaaacccgacccaccgaaaaaccuccaacucaaaccccuuaaaaacagccgccaagucgaagucuccugggaauaccccgacaccugguccacaccccacuccuacuucucacucaccuucugcguccaaguccaaggcaaauccaaacgcgaaaagaaagaccgcguauucaccgacaaaaccuccgccacagucaucugccgcaaaaacgccucaaucuccguccgcgcccaagaccgauacuacagcuccuccuggucagaaugggccuccgucccaugcuccggacuaguuauaagacugacuagcccgaugggccucccaacgggcccuccuccccuccuugcaccgagauuaauaaaaaaaaaaaaaaaaaaaaaaaaaaaaaaaaaaaaaaaaaaaaaaaaaaaaaaaaaaaaaaaaugcaucccccccccccccccccccccccccccccccaaaggcucuuuucagagccaccagaauu

SEQ ID NO: 250 - RNA, 1138 nt, Artificial Sequence
  IL12B(23-328) mRNA product opt8
gggagaaagcuuaccaucugggaacucaagaaagacguauacgucgucgaacuagacugguaccccgacgcacccggagaaaugguaguacucacaugcgacacccccgaagaagacggcaucacauggaccuuagaccaaucaucagaaguccucggauccggaaaaacccucacaauccaagucaaagaguucggcgacgccggccaauacacaugccacaaaggcggagaaguccucucacacucacuccuucuacuacacaagaaagaagacggcaucugguccaccgacauacucaaagaccaaaaagaacccaaaaacaaaaccuuccuccgcugcgaagccaaaaacuacuccggccgauucacaugcugguggcucaccaccaucuccaccgaccugaccuucuccgucaaauccagcaggggcuccucagacccacaaggcguaaccugcggcgcagccacccuaucggccgaacgaguccgcggagacaacaaagaauacgaauacagcgucgaaugccaagaagacucagcaugcccagcagccgaagaaucacuccccaucgaagucauggucgacgccguccacaaacuaaaauacgaaaacuacacaagcucauucuucauccgcgacauaaucaaacccgacccaccgaaaaaccuccaacucaaaccccuuaaaaacagccgccaagucgaagucuccugggaauaccccgacaccugguccacaccccacuccuacuucucacucaccuucugcguccaaguccaaggcaaauccaaacgcgaaaagaaagaccgcguauucaccgacaaaaccuccgccacagucaucugccgcaaaaacgccucaaucuccguccgcgcccaagaccgauacuacagcuccuccuggucagaaugggccuccgucccaugcuccuaaggacuaguuauaagacugacuagcccgaugggccucccaacgggcccuccuccccuccuugcaccgagauuaauaaaaaaaaaaaaaaaaaaaaaaaaaaaaaaaaaaaaaaaaaaaaaaaaaaaaaaaaaaaaaaaaugcaucccccccccccccccccccccccccccccccaaaggcucuuuucagagccaccagaauu

SEQ ID NO: 251 - RNA, 271 nt, Artificial Sequence
  Linker-sFvCC49-218 mRNA product opt8
gggagaaagcuuaccgggagcacgagcgggagcgggaagccgggaaguggagagggaaguacaaagggaggacuaguuauaagacugacuagcccgaugggccucccaacgggcccuccuccccuccuugcaccgagauuaauaaaaaaaaaaaaaaaaaaaaaaaaaaaaaaaaaaaaaaaaaaaaaaaaaaaaaaaaaaaaaaaaugcaucccccccccccccccccccccccccccccccaaaggcucuuuucagagccaccagaauu

SEQ ID NO: 252 - RNA, 1849 nt, Artificial Sequence
  IL12 mRNA product opt8
gggagaaagcuuaccaugugccaccaacaacucgucauaagcugguucagccuaguauuccucgccucaccccucgucgccaucugggaacucaagaaagacguauacgucgucgaacuagacugguaccccgacgcacccggagaaaugguaguacucacaugcgacacccccgaagaagacggcaucacauggaccuuagaccaaucaucagaaguccucggauccggaaaaacccucacaauccaagucaaagaguucggcgacgccggccaauacacaugccacaaaggcggagaaguccucucacacucacuccuucuacuacacaagaaagaagacggcaucugguccaccgacauacucaaagaccaaaaagaacccaaaaacaaaaccuuccuccgcugcgaagccaaaaacuacuccggccgauucacaugcugguggcucaccaccaucuccaccgaccugaccuucuccgucaaauccagcaggggcuccucagacccacaaggcguaaccugcggcgcagccacccuaucggccgaacgaguccgcggagacaacaaagaauacgaauacagcgucgaaugccaagaagacucagcaugcccagcagccgaagaaucacuccccaucgaagucauggucgacgccguccacaaacuaaaauacgaaaacuacacaagcucauucuucauccgcgacauaaucaaacccgacccaccgaaaaaccuccaacucaaaccccuuaaaaacagccgccaagucgaagucuccugggaauaccccgacaccugguccacaccccacuccuacuucucacucaccuucugcguccaaguccaaggcaaauccaaacgcgaaaagaaagaccgcguauucaccgacaaaaccuccgccacagucaucugccgcaaaaacgccucaaucuccguccgcgcccaagaccgauacuacagcuccuccuggucagaaugggccuccgucccaugcuccgggagcacgagcgggagcgggaagccgggaaguggagagggaaguacaaagggacgcaaucuccccgucgccacccccgaccccggaauguuucccugccuccaccacucacaaaaccuccuacgcgccgucucaaacaugcuucaaaaagcccgacaaacccucgaauuuuaccccugcaccuccgaagaaaucgaccacgaagacauaaccaaagacaaaaccuccaccgucgaagccugccuaccauuagaacuaaccaaaaacgaauccugccucaacucacgcgaaaccuccuucaucacaaacggcucaugccucgccucacgcaaaaccuccuucaugauggcccucugccuaucaucaaucuaugaagaccucaaaauguaccaaguagaauuuaaaaccaugaacgccaaacuccucauggaccccaaacgccaaaucuuccucgaccaaaacaugcucgcagucaucgacgaacucaugcaagcccucaacuucaacucagaaacagucccacaaaaauccucccucgaagaacccgacuucuauaaaaccaaaaucaaacucugcauccuccuccacgccuuccgcauacgcgccguaaccaucgaccgcguaaugucauaccuaaaugccucuuaaggacuaguuauaagacugacuagcccgaugggccucccaacgggcccuccuccccuccuugcaccgagauuaauaaaaaaaaaaaaaaaaaaaaaaaaaaaaaaaaaaaaaaaaaaaaaaaaaaaaaaaaaaaaaaaaugcaucccccccccccccccccccccccccccccccaaaggcucuuuucagagccaccagaauu

SEQ ID NO: 253 - RNA, 1003 nt, Artificial Sequence
  CD40LG mRNA product opt8
gggagaaagcuuaccaugauagaaaccuacaaccaaaccucuccccgauccgcagccaccggccuccccaucuccaugaaaaucuucauguaccuccuaaccgucuuccuaaucacucaaaugaucggcuccgcucucuucgcagucuaccuccaccgccgccuagacaaaaucgaagacgaacgcaaccuacacgaagacuucgucuucaugaaaaccauucaacgcugcaacacaggcgaacgaucccuaucccuacucaacugcgaagaaaucaaaucccaauucgaaggcuuuguaaaagacaucaugcucaacaaagaagaaaccaaaaaagaaaacuccuucgaaaugcaaaaaggcgaccaaaacccccaaauagccgcccaugucauaucagaagccuccuccaaaaccaccuccguccuccaaugggccgaaaaaggcuacuacaccauguccaacaaccuaguaacccuugaaaacggcaaacaacucaccguaaaacgccaaggccucuacuacaucuacgcccaagucaccuucugcuccaacagagaagcauccucccaagcacccuucaucgccucccuaugccucaaaucccccggccgcuucgaacgaauccuccuccgcgccgccaacacucacuccucagccaaacccugcggccaacaaaguauacaccuuggcggagucuucgaacuccaacccggcgccuccgucuucguaaacgucaccgaccccucacaagucucccacggaaccggauucaccuccuucggccuacuaaaacuauagggacuaguuauaagacugacuagcccgaugggccucccaacgggcccuccuccccuccuugcaccgagauuaauaaaaaaaaaaaaaaaaaaaaaaaaaaaaaaaaaaaaaaaaaaaaaaaaaaaaaaaaaaaaaaaaugcaucccccccccccccccccccccccccccccccaaaggcucuuuucagagccaccagaauu

SEQ ID NO: 254 - RNA, 1084 nt, Artificial Sequence
  PDCD1 mRNA product opt9
gggagaaagcuuaccaugcaaaucccccaagccccauggcccgucgucugggccguccuccaacucggcuggcgccccggaugguuccuagacucuccagaccgccccuggaauccacccaccuucucccccgcccuccuagucgucaccgaaggcgacaacgccaccuucaccuguucauucuccaacaccucagaauccuucguacucaacugguaccgcauguccccaagcaaccaaacagacaaacucgccgccuuccccgaagaccgcucccaacccggucaagacugccgauuccgcgucacccaacuccccaacggacgcgacuuccacauguccgucguucgagcacgacgcaacgacucaggcacauaccuaugcggagccaucucccuagcccccaaagcccaaaucaaagaaucacuacgcgccgaacuccgcgucaccgaacgccgcgccgaaguacccacagcccacccauccccaucaccacgcccagcaggucaauuccaaaccuuagucgucggagucgucggcggccuccuaggcucacucguccuccuagucuggguccucgccgucauaugcagccgcgccgcacgcggcaccaucggcgccagacgcaccggacaaccccucaaagaagaccccucagccguccccgucuuuuccgucgacuacggcgaacuagacuuccaauggcgcgaaaaaacccccgaaccccccgucccaugcguacccgaacaaaccgaauacgccacaauagucuucccauccggcaugggaaccucaucacccgccagacgaggcucagcagauggcccccgcuccgcacaaccacuccgaccagaagacggccacugcagcuggccccuguaaggacuaguuauaagacugacuagcccgaugggccucccaacgggcccuccuccccuccuugcaccgagauuaauaaaaaaaaaaaaaaaaaaaaaaaaaaaaaaaaaaaaaaaaaaaaaaaaaaaaaaaaaaaaaaaaugcaucccccccccccccccccccccccccccccccaaaggcucuuuucagagccaccagaauu

SEQ ID NO: 255 - RNA, 667 nt, Artificial Sequence
  PDCD1(1-149) mRNA product opt9
gggagaaagcuuaccaugcaaaucccccaagccccauggcccgucgucugggccguccuccaacucggcuggcgccccggaugguuccuagacucuccagaccgccccuggaauccacccaccuucucccccgcccuccuagucgucaccgaaggcgacaacgccaccuucaccuguucauucuccaacaccucagaauccuucguacucaacugguaccgcauguccccaagcaaccaaacagacaaacucgccgccuuccccgaagaccgcucccaacccggucaagacugccgauuccgcgucacccaacuccccaacggacgcgacuuccacauguccgucguucgagcacgacgcaacgacucaggcacauaccuaugcggagccaucucccuagcccccaaagcccaaaucaaagaaucacuacgcgccgaacuccgcgucaccgaacgccgcgccuaaggacuaguuauaagacugacuagcccgaugggccucccaacgggcccuccuccccuccuugcaccgagauuaauaaaaaaaaaaaaaaaaaaaaaaaaaaaaaaaaaaaaaaaaaaaaaaaaaaaaaaaaaaaaaaaaugcaucccccccccccccccccccccccccccccccaaaggcucuuuucagagccaccagaauu

SEQ ID NO: 256 - RNA, 877 nt, Artificial Sequence
  IL12A mRNA product opt9
gggagaaagcuuaccaugugccccgccagaucccuccuccucgucgcaacccucguccuccucgaccaccucucccuagcacguaaccucccagucgccaccccagaccccggaauguuccccugccuccaucacucccaaaaucuccuccgugccgucuccaacaugcuccaaaaagcccgccaaacccucgaauuuuauccaugcaccuccgaagaaauagaccaugaagacaucaccaaagacaaaacauccaccgucgaagccugccucccccucgaacucacaaaaaacgaaucaugccucaacucccgcgaaaccuccuucauaaccaacggcucaugccucgccucucgcaaaaccucauucaugauggcccucugccuauccucuaucuacgaagaccucaaaauguaccaagucgaauuuaaaaccaugaacgccaaacuccucauggaccccaaacgccaaaucuuccucgaccaaaacaugcucgcagucaucgacgaacucaugcaagcacucaacuucaacucagaaaccgucccccaaaaauccucccucgaagaacccgacuucuacaaaacaaaaauaaaacucugcauccuccuccacgccuuccgcauccgagcagucaccaucgaucgcgucauguccuaccuaaacgccuccuaaggacuaguuauaagacugacuagcccgaugggccucccaacgggcccuccuccccuccuugcaccgagauuaauaaaaaaaaaaaaaaaaaaaaaaaaaaaaaaaaaaaaaaaaaaaaaaaaaaaaaaaaaaaaaaaaugcaucccccccccccccccccccccccccccccccaaaggcucuuuucagagccaccagaauu

SEQ ID NO: 257 - RNA, 874 nt, Artificial Sequence
  IL12A(1-219) mRNA product opt9
gggagaaagcuuaccaugugccccgccagaucccuccuccucgucgcaacccucguccuccucgaccaccucucccuagcacguaaccucccagucgccaccccagaccccggaauguuccccugccuccaucacucccaaaaucuccuccgugccgucuccaacaugcuccaaaaagcccgccaaacccucgaauuuuauccaugcaccuccgaagaaauagaccaugaagacaucaccaaagacaaaacauccaccgucgaagccugccucccccucgaacucacaaaaaacgaaucaugccucaacucccgcgaaaccuccuucauaaccaacggcucaugccucgccucucgcaaaaccucauucaugauggcccucugccuauccucuaucuacgaagaccucaaaauguaccaagucgaauuuaaaaccaugaacgccaaacuccucauggaccccaaacgccaaaucuuccucgaccaaaacaugcucgcagucaucgacgaacucaugcaagcacucaacuucaacucagaaaccgucccccaaaaauccucccucgaagaacccgacuucuacaaaacaaaaauaaaacucugcauccuccuccacgccuuccgcauccgagcagucaccaucgaucgcgucauguccuaccuaaacgccuccggacuaguuauaagacugacuagcccgaugggccucccaacgggcccuccuccccuccuugcaccgagauuaauaaaaaaaaaaaaaaaaaaaaaaaaaaaaaaaaaaaaaaaaaaaaaaaaaaaaaaaaaaaaaaaaugcaucccccccccccccccccccccccccccccccaaaggcucuuuucagagccaccagaauu

SEQ ID NO: 258 - RNA, 811 nt, Artificial Sequence
  IL12A(23-219) mRNA product opt9
gggagaaagcuuacccguaaccucccagucgccaccccagaccccggaauguuccccugccuccaucacucccaaaaucuccuccgugccgucuccaacaugcuccaaaaagcccgccaaacccucgaauuuuauccaugcaccuccgaagaaauagaccaugaagacaucaccaaagacaaaacauccaccgucgaagccugccucccccucgaacucacaaaaaacgaaucaugccucaacucccgcgaaaccuccuucauaaccaacggcucaugccucgccucucgcaaaaccucauucaugauggcccucugccuauccucuaucuacgaagaccucaaaauguaccaagucgaauuuaaaaccaugaacgccaaacuccucauggaccccaaacgccaaaucuuccucgaccaaaacaugcucgcagucaucgacgaacucaugcaagcacucaacuucaacucagaaaccgucccccaaaaauccucccucgaagaacccgacuucuacaaaacaaaaauaaaacucugcauccuccuccacgccuuccgcauccgagcagucaccaucgaucgcgucauguccuaccuaaacgccuccuaaggacuaguuauaagacugacuagcccgaugggccucccaacgggcccuccuccccuccuugcaccgagauuaauaaaaaaaaaaaaaaaaaaaaaaaaaaaaaaaaaaaaaaaaaaaaaaaaaaaaaaaaaaaaaaaaugcaucccccccccccccccccccccccccccccccaaaggcucuuuucagagccaccagaauu

SEQ ID NO: 259 - RNA, 1204 nt, Artificial Sequence
  IL12B mRNA product opt9
gggagaaagcuuaccaugugucaccaacaacuuguaaucagcugguucucccucgucuuccucgccucaccccucgucgccaucugggaacucaaaaaagacgucuacguagucgaacucgacugguaccccgacgccccaggagaaauggucguacucaccugugacacccccgaagaagacggcaucaccuggacccucgaccaauccuccgaaguccucgguucaggaaaaacccucaccauccaaguaaaagaauuuggcgacgccgggcaauauaccugccacaaaggcggcgagguccuaucccacucacuccuccuccuccacaagaaagaagacggaaucugguccaccgacauccuuaaagaccaaaaagaaccaaaaaacaaaacauuccuccgcugcgaagccaaaaacuacagcggccgcuucaccuguugguggcuaaccacaauaucaaccgacuuaaccuucagcgucaaauccuccagaggauccagcgacccacaaggaguuaccugcggagccgcaacacucagcgccgaacgaguccgcggagacaacaaagaauacgaauacuccgucgaaugccaagaagacucagcaugccccgccgcagaagaaucccuacccaucgaaguaaugguagacgccguccacaaacucaaauacgaaaacuacaccagcuccuucuucauccgagacaucaucaaacccgaccccccaaaaaaccuccaacuaaaaccccucaaaaacagccgccaaguagaaguauccugggaauaccccgacaccugguccacaccccacuccuacuucucgcucacguucugcguccaaguccaaggcaaauccaaacgagaaaaaaaagaccgcgucuucaccgacaaaacuuccgccaccgucaucugccgcaaaaacgccagcaucagcguccgcgcacaagaccgcuacuacucaagcuccugguccgaaugggccuccgucccaugcucauaaggacuaguuauaagacugacuagcccgaugggccucccaacgggcccuccuccccuccuugcaccgagauuaauaaaaaaaaaaaaaaaaaaaaaaaaaaaaaaaaaaaaaaaaaaaaaaaaaaaaaaaaaaaaaaaaugcaucccccccccccccccccccccccccccccccaaaggcucuuuucagagccaccagaauu

SEQ ID NO: 260 - RNA, 1201 nt, Artificial Sequence
  IL12B(1-328) mRNA product opt9
gggagaaagcuuaccaugugucaccaacaacuuguaaucagcugguucucccucgucuuccucgccucaccccucgucgccaucugggaacucaaaaaagacgucuacguagucgaacucgacugguaccccgacgccccaggagaaauggucguacucaccugugacacccccgaagaagacggcaucaccuggacccucgaccaauccuccgaaguccucgguucaggaaaaacccucaccauccaaguaaaagaauuuggcgacgccgggcaauauaccugccacaaaggcggcgagguccuaucccacucacuccuccuccuccacaagaaagaagacggaaucugguccaccgacauccuuaaagaccaaaaagaaccaaaaaacaaaacauuccuccgcugcgaagccaaaaacuacagcggccgcuucaccuguugguggcuaaccacaauaucaaccgacuuaaccuucagcgucaaauccuccagaggauccagcgacccacaaggaguuaccugcggagccgcaacacucagcgccgaacgaguccgcggagacaacaaagaauacgaauacuccgucgaaugccaagaagacucagcaugccccgccgcagaagaaucccuacccaucgaaguaaugguagacgccguccacaaacucaaauacgaaaacuacaccagcuccuucuucauccgagacaucaucaaacccgaccccccaaaaaaccuccaacuaaaaccccucaaaaacagccgccaaguagaaguauccugggaauaccccgacaccugguccacaccccacuccuacuucucgcucacguucugcguccaaguccaaggcaaauccaaacgagaaaaaaaagaccgcgucuucaccgacaaaacuuccgccaccgucaucugccgcaaaaacgccagcaucagcguccgcgcacaagaccgcuacuacucaagcuccugguccgaaugggccuccgucccaugcucaggacuaguuauaagacugacuagcccgaugggccucccaacgggcccuccuccccuccuugcaccgagauuaauaaaaaaaaaaaaaaaaaaaaaaaaaaaaaaaaaaaaaaaaaaaaaaaaaaaaaaaaaaaaaaaaugcaucccccccccccccccccccccccccccccccaaaggcucuuuucagagccaccagaauu

SEQ ID NO: 261 - RNA, 1138 nt, Artificial Sequence
  IL12B(23-328) mRNA product opt9
gggagaaagcuuaccaucugggaacucaaaaaagacgucuacguagucgaacucgacugguaccccgacgccccaggagaaauggucguacucaccugugacacccccgaagaagacggcaucaccuggacccucgaccaauccuccgaaguccucgguucaggaaaaacccucaccauccaaguaaaagaauuuggcgacgccgggcaauauaccugccacaaaggcggcgagguccuaucccacucacuccuccuccuccacaagaaagaagacggaaucugguccaccgacauccuuaaagaccaaaaagaaccaaaaaacaaaacauuccuccgcugcgaagccaaaaacuacagcggccgcuucaccuguugguggcuaaccacaauaucaaccgacuuaaccuucagcgucaaauccuccagaggauccagcgacccacaaggaguuaccugcggagccgcaacacucagcgccgaacgaguccgcggagacaacaaagaauacgaauacuccgucgaaugccaagaagacucagcaugccccgccgcagaagaaucccuacccaucgaaguaaugguagacgccguccacaaacucaaauacgaaaacuacaccagcuccuucuucauccgagacaucaucaaacccgaccccccaaaaaaccuccaacuaaaaccccucaaaaacagccgccaaguagaaguauccugggaauaccccgacaccugguccacaccccacuccuacuucucgcucacguucugcguccaaguccaaggcaaauccaaacgagaaaaaaaagaccgcgucuucaccgacaaaacuuccgccaccgucaucugccgcaaaaacgccagcaucagcguccgcgcacaagaccgcuacuacucaagcuccugguccgaaugggccuccgucccaugcucauaaggacuaguuauaagacugacuagcccgaugggccucccaacgggcccuccuccccuccuugcaccgagauuaauaaaaaaaaaaaaaaaaaaaaaaaaaaaaaaaaaaaaaaaaaaaaaaaaaaaaaaaaaaaaaaaaugcaucccccccccccccccccccccccccccccccaaaggcucuuuucagagccaccagaauu

SEQ ID NO: 262 - RNA, 271 nt, Artificial Sequence
  Linker-sFvCC49-218 mRNA product opt9
gggagaaagcuuaccgggaguacgagugggagugggaagccggggaguggggaggggaguacgaaggggggacuaguuauaagacugacuagcccgaugggccucccaacgggcccuccuccccuccuugcaccgagauuaauaaaaaaaaaaaaaaaaaaaaaaaaaaaaaaaaaaaaaaaaaaaaaaaaaaaaaaaaaaaaaaaaugcaucccccccccccccccccccccccccccccccaaaggcucuuuucagagccaccagaauu

SEQ ID NO: 263 - RNA, 1849 nt, Artificial Sequence
  IL12 mRNA product opt9
gggagaaagcuuaccaugugucaccaacaacuuguaaucagcugguucucccucgucuuccucgccucaccccucgucgccaucugggaacucaaaaaagacgucuacguagucgaacucgacugguaccccgacgccccaggagaaauggucguacucaccugugacacccccgaagaagacggcaucaccuggacccucgaccaauccuccgaaguccucgguucaggaaaaacccucaccauccaaguaaaagaauuuggcgacgccgggcaauauaccugccacaaaggcggcgagguccuaucccacucacuccuccuccuccacaagaaagaagacggaaucugguccaccgacauccuuaaagaccaaaaagaaccaaaaaacaaaacauuccuccgcugcgaagccaaaaacuacagcggccgcuucaccuguugguggcuaaccacaauaucaaccgacuuaaccuucagcgucaaauccuccagaggauccagcgacccacaaggaguuaccugcggagccgcaacacucagcgccgaacgaguccgcggagacaacaaagaauacgaauacuccgucgaaugccaagaagacucagcaugccccgccgcagaagaaucccuacccaucgaaguaaugguagacgccguccacaaacucaaauacgaaaacuacaccagcuccuucuucauccgagacaucaucaaacccgaccccccaaaaaaccuccaacuaaaaccccucaaaaacagccgccaaguagaaguauccugggaauaccccgacaccugguccacaccccacuccuacuucucgcucacguucugcguccaaguccaaggcaaauccaaacgagaaaaaaaagaccgcgucuucaccgacaaaacuuccgccaccgucaucugccgcaaaaacgccagcaucagcguccgcgcacaagaccgcuacuacucaagcuccugguccgaaugggccuccgucccaugcucagggaguacgagugggagugggaagccggggaguggggaggggaguacgaaggggcguaaccucccagucgccaccccagaccccggaauguuccccugccuccaucacucccaaaaucuccuccgugccgucuccaacaugcuccaaaaagcccgccaaacccucgaauuuuauccaugcaccuccgaagaaauagaccaugaagacaucaccaaagacaaaacauccaccgucgaagccugccucccccucgaacucacaaaaaacgaaucaugccucaacucccgcgaaaccuccuucauaaccaacggcucaugccucgccucucgcaaaaccucauucaugauggcccucugccuauccucuaucuacgaagaccucaaaauguaccaagucgaauuuaaaaccaugaacgccaaacuccucauggaccccaaacgccaaaucuuccucgaccaaaacaugcucgcagucaucgacgaacucaugcaagcacucaacuucaacucagaaaccgucccccaaaaauccucccucgaagaacccgacuucuacaaaacaaaaauaaaacucugcauccuccuccacgccuuccgcauccgagcagucaccaucgaucgcgucauguccuaccuaaacgccuccuaaggacuaguuauaagacugacuagcccgaugggccucccaacgggcccuccuccccuccuugcaccgagauuaauaaaaaaaaaaaaaaaaaaaaaaaaaaaaaaaaaaaaaaaaaaaaaaaaaaaaaaaaaaaaaaaaugcaucccccccccccccccccccccccccccccccaaaggcucuuuucagagccaccagaauu

SEQ ID NO: 264 - RNA, 1003 nt, Artificial Sequence
  CD40LG mRNA product opt9
gggagaaagcuuaccaugaucgaaacauacaaccaaacauccccccgcuccgccgccacaggccuccccaucuccaugaaaaucuucauguaccuccucacaguauuccucaucacccaaaugaucggcuccgcacucuuugcagucuaucuccaccgucgccucgacaaaaucgaagacgaacgcaaccuccacgaagacuucgucuucaugaaaaccauacaacgcugcaacaccggcgaacgcucacucucccuacuaaacugcgaagaaaucaaaucccaauucgaaggcuucgucaaagacaucaugcuaaacaaagaagaaacaaaaaaagaaaacuccuucgaaaugcaaaaaggcgaccaaaacccccaaauagccgcccacgucaucuccgaagccuccuccaaaaccaccuccguccuccaaugggccgaaaaaggcuacuacacaauguccaacaaccucgucacccucgaaaacggcaaacaacucaccgucaaacgccaaggccucuacuacaucuacgcccaaguaaccuucugcuccaaccgcgaagccucaucucaagcucccuucaucgccucacucugccucaaaucacccggccgcuucgaaagaauccuccuccgcgccgcaaacacccacucauccgccaaacccugcggccaacaauccauacaccucggcggcguuuucgagcuccaaccuggcgccuccgucuucguaaacgucaccgaccccucacaagucucccacgguaccggcuucaccuccuucggacuccuaaaacucuaaggacuaguuauaagacugacuagcccgaugggccucccaacgggcccuccuccccuccuugcaccgagauuaauaaaaaaaaaaaaaaaaaaaaaaaaaaaaaaaaaaaaaaaaaaaaaaaaaaaaaaaaaaaaaaaaugcaucccccccccccccccccccccccccccccccaaaggcucuuuucagagccaccagaauu

SEQ ID NO: 265 - RNA, 1084 nt, Artificial Sequence
  PDCD1 mRNA product opt10
gggagaaagcuuaccaugcaaaucccccaagcccccuggccggucgucugggccguccuccaacucggcuggcgccccggaugguuccucgacucccccgaccgcccguggaacccccccaccuucucccccgcccuccuagucgucaccgaaggcgacaacgccaccuucaccuguuccuucuccaacaccucagaauccuucguccucaacugguaccgcaugucccccuccaaccaaaccgacaaacucgccgccuuccccgaagaccgaucccaacccggccaagacugccgcuuccgcgucacacaacuucccaacggacgcgacuuucacauguccgucguccgcgcccgccgcaacgacuccggcaccuaccucugcggcgccaucucccucgcccccaaagcccaaaucaaagaaucccucagagccgaacuccgcgucaccgaacggcgcgccgaaguccccacugcccaccccucccccuccccccgccccgccggccaauuccaaacccucgucgucggcguugucggcggccuccucggcucacucguccuccucgucuggguacucgccgucaucugcucccgcgccgcgcgcggcaccaucggcgcgcgccgcaccggacaaccccuaaaagaagaccccuccgccguccccgucuucuccgucgacuacggcgaacucgacuuccaauggcgcgaaaaaaccccggaaccccccgucccgugcguccccgaacaaacagaauacgcgaccaucgucuucccguccggcaugggcacauccucacccgcccgccgaggcuccgccgacggcccccgauccgcccaaccccuacgccccgaagacggccacugcuccuggccccucuaaggacuaguuauaagacugacuagcccgaugggccucccaacgggcccuccuccccuccuugcaccgagauuaauaaaaaaaaaaaaaaaaaaaaaaaaaaaaaaaaaaaaaaaaaaaaaaaaaaaaaaaaaaaaaaaaugcaucccccccccccccccccccccccccccccccaaaggcucuuuucagagccaccagaauu

SEQ ID NO: 266 - RNA, 667 nt, Artificial Sequence
  PDCD1(1-149) mRNA product opt10
gggagaaagcuuaccaugcaaaucccccaagcccccuggccggucgucugggccguccuccaacucggcuggcgccccggaugguuccucgacucccccgaccgcccguggaacccccccaccuucucccccgcccuccuagucgucaccgaaggcgacaacgccaccuucaccuguuccuucuccaacaccucagaauccuucguccucaacugguaccgcaugucccccuccaaccaaaccgacaaacucgccgccuuccccgaagaccgaucccaacccggccaagacugccgcuuccgcgucacacaacuucccaacggacgcgacuuucacauguccgucguccgcgcccgccgcaacgacuccggcaccuaccucugcggcgccaucucccucgcccccaaagcccaaaucaaagaaucccucagagccgaacuccgcgucaccgaacggcgcgccuaaggacuaguuauaagacugacuagcccgaugggccucccaacgggcccuccuccccuccuugcaccgagauuaauaaaaaaaaaaaaaaaaaaaaaaaaaaaaaaaaaaaaaaaaaaaaaaaaaaaaaaaaaaaaaaaaugcaucccccccccccccccccccccccccccccccaaaggcucuuuucagagccaccagaauu

SEQ ID NO: 267 - RNA, 877 nt, Artificial Sequence
  IL12A mRNA product opt10
gggagaaagcuuaccaugugccccgcccguucacuccuccucgucgccacccucguccuccuagaccaccucucccuggcccgcaaccucccagucgccacccccgaccccggcauguuccccugccuccaccacucccaaaaccuccuccgcgccgucuccaacaugcuccaaaaagcccgccaaacccucgaauuuuaccccugcaccuccgaagagaucgaccacgaagacaucaccaaagacaaaaccuccacagucgaagccugccucccccucgaacucaccaaaaacgaauccugccuuaacucccgcgaaaccuccuucaucaccaacggcuccugccucgccucccgcaaaaccuccuucaugauggcccucugccucuccuccaucuacgaagaccucaaaauguaccaagucgaauuuaaaaccaugaacgccaaacuccucauggaccccaaacgccaaaucuuccucgaccaaaacaugcucgccgucaucgacgaacucaugcaagcccucaacuucaacuccgaaaccgucccccaaaaauccucccucgaagaacccgacuucuacaaaaccaaaaucaaacuuugcauccuccuccacgcauuccgcauccgcgccgucaccaucgaccgugucaugagcuaccuaaacgccuccugaggacuaguuauaagacugacuagcccgaugggccucccaacgggcccuccuccccuccuugcaccgagauuaauaaaaaaaaaaaaaaaaaaaaaaaaaaaaaaaaaaaaaaaaaaaaaaaaaaaaaaaaaaaaaaaaugcaucccccccccccccccccccccccccccccccaaaggcucuuuucagagccaccagaauu

SEQ ID NO: 268 - RNA, 874 nt, Artificial Sequence
  IL12A(1-219) mRNA product opt10
gggagaaagcuuaccaugugccccgcccguucacuccuccucgucgccacccucguccuccuagaccaccucucccuggcccgcaaccucccagucgccacccccgaccccggcauguuccccugccuccaccacucccaaaaccuccuccgcgccgucuccaacaugcuccaaaaagcccgccaaacccucgaauuuuaccccugcaccuccgaagagaucgaccacgaagacaucaccaaagacaaaaccuccacagucgaagccugccucccccucgaacucaccaaaaacgaauccugccuuaacucccgcgaaaccuccuucaucaccaacggcuccugccucgccucccgcaaaaccuccuucaugauggcccucugccucuccuccaucuacgaagaccucaaaauguaccaagucgaauuuaaaaccaugaacgccaaacuccucauggaccccaaacgccaaaucuuccucgaccaaaacaugcucgccgucaucgacgaacucaugcaagcccucaacuucaacuccgaaaccgucccccaaaaauccucccucgaagaacccgacuucuacaaaaccaaaaucaaacuuugcauccuccuccacgcauuccgcauccgcgccgucaccaucgaccgugucaugagcuaccuaaacgccuccggacuaguuauaagacugacuagcccgaugggccucccaacgggcccuccuccccuccuugcaccgagauuaauaaaaaaaaaaaaaaaaaaaaaaaaaaaaaaaaaaaaaaaaaaaaaaaaaaaaaaaaaaaaaaaaugcaucccccccccccccccccccccccccccccccaaaggcucuuuucagagccaccagaauu

SEQ ID NO: 269 - RNA, 811 nt, Artificial Sequence
  IL12A(23-219) mRNA product opt10
gggagaaagcuuacccgcaaccucccagucgccacccccgaccccggcauguuccccugccuccaccacucccaaaaccuccuccgcgccgucuccaacaugcuccaaaaagcccgccaaacccucgaauuuuaccccugcaccuccgaagagaucgaccacgaagacaucaccaaagacaaaaccuccacagucgaagccugccucccccucgaacucaccaaaaacgaauccugccuuaacucccgcgaaaccuccuucaucaccaacggcuccugccucgccucccgcaaaaccuccuucaugauggcccucugccucuccuccaucuacgaagaccucaaaauguaccaagucgaauuuaaaaccaugaacgccaaacuccucauggaccccaaacgccaaaucuuccucgaccaaaacaugcucgccgucaucgacgaacucaugcaagcccucaacuucaacuccgaaaccgucccccaaaaauccucccucgaagaacccgacuucuacaaaaccaaaaucaaacuuugcauccuccuccacgcauuccgcauccgcgccgucaccaucgaccgugucaugagcuaccuaaacgccuccugaggacuaguuauaagacugacuagcccgaugggccucccaacgggcccuccuccccuccuugcaccgagauuaauaaaaaaaaaaaaaaaaaaaaaaaaaaaaaaaaaaaaaaaaaaaaaaaaaaaaaaaaaaaaaaaaugcaucccccccccccccccccccccccccccccccaaaggcucuuuucagagccaccagaauu

SEQ ID NO: 270 - RNA, 1204 nt, Artificial Sequence
  IL12B mRNA product opt10
gggagaaagcuuaccaugugccaccaacaacucgucaucuccugguucucccucgucuuccuagccuccccacucgucgccaucugggaacucaaaaaagacguauacgucgucgaacucgacugguaccccgacgccccaggagaaauggucguccuaaccugcgacacacccgaagaagacgguaucaccuggacccucgaccaauccuccgaaguccuaggcuccggcaagacccucaccauccaagucaaagaauuuggcgacgcaggacaauacaccugucacaaaggcggcgaaguccucagccacagccuucuccuacuccauaaaaaagaagacggcaucugguccacugacauccucaaagaccaaaaagaacccaaaaauaaaaccuuccuccgcugcgaagccaaaaacuacuccggccgauucaccuguugguggcuaaccacaaucagcaccgaccucaccuucucagucaaauccucccgcggcucaucugacccccaaggcgucacaugcggcgccgccacccucuccgccgaacgcguccgcggcgacaacaaagaauacgaauacuccgucgaaugucaagaagacuccgccugccccgccgccgaagaaucacuccccaucgaagucauggucgacgcaguccacaaacucaaauacgaaaacuacaccuccuccuucuucauccgcgacauaauaaaacccgacccacccaaaaaccuccaacucaagccacucaaaaacucccgacaagucgaagucuccugggaguaccccgacaccugguccacaccacacuccuacuucucccucaccuucugcguccaaguccaaggcaaauccaaacgcgaaaaaaaagaccgcguuuucacagacaaaaccuccgccacaguaauaugccgcaaaaacgccuccaucuccguccgggcccaagaccgcuacuacuccuccuccugguccgagugggccucaguccccugcagcuaaggacuaguuauaagacugacuagcccgaugggccucccaacgggcccuccuccccuccuugcaccgagauuaauaaaaaaaaaaaaaaaaaaaaaaaaaaaaaaaaaaaaaaaaaaaaaaaaaaaaaaaaaaaaaaaaugcaucccccccccccccccccccccccccccccccaaaggcucuuuucagagccaccagaauu

SEQ ID NO: 271 - RNA, 1201 nt, Artificial Sequence
  IL12B(1-328) mRNA product opt10
gggagaaagcuuaccaugugccaccaacaacucgucaucuccugguucucccucgucuuccuagccuccccacucgucgccaucugggaacucaaaaaagacguauacgucgucgaacucgacugguaccccgacgccccaggagaaauggucguccuaaccugcgacacacccgaagaagacgguaucaccuggacccucgaccaauccuccgaaguccuaggcuccggcaagacccucaccauccaagucaaagaauuuggcgacgcaggacaauacaccugucacaaaggcggcgaaguccucagccacagccuucuccuacuccauaaaaaagaagacggcaucugguccacugacauccucaaagaccaaaaagaacccaaaaauaaaaccuuccuccgcugcgaagccaaaaacuacuccggccgauucaccuguugguggcuaaccacaaucagcaccgaccucaccuucucagucaaauccucccgcggcucaucugacccccaaggcgucacaugcggcgccgccacccucuccgccgaacgcguccgcggcgacaacaaagaauacgaauacuccgucgaaugucaagaagacuccgccugccccgccgccgaagaaucacuccccaucgaagucauggucgacgcaguccacaaacucaaauacgaaaacuacaccuccuccuucuucauccgcgacauaauaaaacccgacccacccaaaaaccuccaacucaagccacucaaaaacucccgacaagucgaagucuccugggaguaccccgacaccugguccacaccacacuccuacuucucccucaccuucugcguccaaguccaaggcaaauccaaacgcgaaaaaaaagaccgcguuuucacagacaaaaccuccgccacaguaauaugccgcaaaaacgccuccaucuccguccgggcccaagaccgcuacuacuccuccuccugguccgagugggccucaguccccugcagcggacuaguuauaagacugacuagcccgaugggccucccaacgggcccuccuccccuccuugcaccgagauuaauaaaaaaaaaaaaaaaaaaaaaaaaaaaaaaaaaaaaaaaaaaaaaaaaaaaaaaaaaaaaaaaaugcaucccccccccccccccccccccccccccccccaaaggcucuuuucagagccaccagaauu

SEQ ID NO: 272 - RNA, 1138 nt, Artificial Sequence
  IL12B(23-328) mRNA product opt10
gggagaaagcuuaccaucugggaacucaaaaaagacguauacgucgucgaacucgacugguaccccgacgccccaggagaaauggucguccuaaccugcgacacacccgaagaagacgguaucaccuggacccucgaccaauccuccgaaguccuaggcuccggcaagacccucaccauccaagucaaagaauuuggcgacgcaggacaauacaccugucacaaaggcggcgaaguccucagccacagccuucuccuacuccauaaaaaagaagacggcaucugguccacugacauccucaaagaccaaaaagaacccaaaaauaaaaccuuccuccgcugcgaagccaaaaacuacuccggccgauucaccuguugguggcuaaccacaaucagcaccgaccucaccuucucagucaaauccucccgcggcucaucugacccccaaggcgucacaugcggcgccgccacccucuccgccgaacgcguccgcggcgacaacaaagaauacgaauacuccgucgaaugucaagaagacuccgccugccccgccgccgaagaaucacuccccaucgaagucauggucgacgcaguccacaaacucaaauacgaaaacuacaccuccuccuucuucauccgcgacauaauaaaacccgacccacccaaaaaccuccaacucaagccacucaaaaacucccgacaagucgaagucuccugggaguaccccgacaccugguccacaccacacuccuacuucucccucaccuucugcguccaaguccaaggcaaauccaaacgcgaaaaaaaagaccgcguuuucacagacaaaaccuccgccacaguaauaugccgcaaaaacgccuccaucuccguccgggcccaagaccgcuacuacuccuccuccugguccgagugggccucaguccccugcagcuaaggacuaguuauaagacugacuagcccgaugggccucccaacgggcccuccuccccuccuugcaccgagauuaauaaaaaaaaaaaaaaaaaaaaaaaaaaaaaaaaaaaaaaaaaaaaaaaaaaaaaaaaaaaaaaaaugcaucccccccccccccccccccccccccccccccaaaggcucuuuucagagccaccagaauu

SEQ ID NO: 273 - RNA, 271 nt, Artificial Sequence; identical to SEQ ID NO: 262
  Linker-sFvCC49-218 mRNA product opt10

SEQ ID NO: 274 - RNA, 1849 nt, Artificial Sequence
  IL12 mRNA product opt10
gggagaaagcuuaccaugugccaccaacaacucgucaucuccugguucucccucgucuuccuagccuccccacucgucgccaucugggaacucaaaaaagacguauacgucgucgaacucgacugguaccccgacgccccaggagaaauggucguccuaaccugcgacacacccgaagaagacgguaucaccuggacccucgaccaauccuccgaaguccuaggcuccggcaagacccucaccauccaagucaaagaauuuggcgacgcaggacaauacaccugucacaaaggcggcgaaguccucagccacagccuucuccuacuccauaaaaaagaagacggcaucugguccacugacauccucaaagaccaaaaagaacccaaaaauaaaaccuuccuccgcugcgaagccaaaaacuacuccggccgauucaccuguugguggcuaaccacaaucagcaccgaccucaccuucucagucaaauccucccgcggcucaucugacccccaaggcgucacaugcggcgccgccacccucuccgccgaacgcguccgcggcgacaacaaagaauacgaauacuccgucgaaugucaagaagacuccgccugccccgccgccgaagaaucacuccccaucgaagucauggucgacgcaguccacaaacucaaauacgaaaacuacaccuccuccuucuucauccgcgacauaauaaaacccgacccacccaaaaaccuccaacucaagccacucaaaaacucccgacaagucgaagucuccugggaguaccccgacaccugguccacaccacacuccuacuucucccucaccuucugcguccaaguccaaggcaaauccaaacgcgaaaaaaaagaccgcguuuucacagacaaaaccuccgccacaguaauaugccgcaaaaacgccuccaucuccguccgggcccaagaccgcuacuacuccuccuccugguccgagugggccucaguccccugcagcgggaguacgagugggagugggaagccggggaguggggaggggaguacgaaggggcgcaaccucccagucgccacccccgaccccggcauguuccccugccuccaccacucccaaaaccuccuccgcgccgucuccaacaugcuccaaaaagcccgccaaacccucgaauuuuaccccugcaccuccgaagagaucgaccacgaagacaucaccaaagacaaaaccuccacagucgaagccugccucccccucgaacucaccaaaaacgaauccugccuuaacucccgcgaaaccuccuucaucaccaacggcuccugccucgccucccgcaaaaccuccuucaugauggcccucugccucuccuccaucuacgaagaccucaaaauguaccaagucgaauuuaaaaccaugaacgccaaacuccucauggaccccaaacgccaaaucuuccucgaccaaaacaugcucgccgucaucgacgaacucaugcaagcccucaacuucaacuccgaaaccgucccccaaaaauccucccucgaagaacccgacuucuacaaaaccaaaaucaaacuuugcauccuccuccacgcauuccgcauccgcgccgucaccaucgaccgugucaugagcuaccuaaacgccuccugaggacuaguuauaagacugacuagcccgaugggccucccaacgggcccuccuccccuccuugcaccgagauuaauaaaaaaaaaaaaaaaaaaaaaaaaaaaaaaaaaaaaaaaaaaaaaaaaaaaaaaaaaaaaaaaaugcaucccccccccccccccccccccccccccccccaaaggcucuuuucagagccaccagaauu

SEQ ID NO: 275 - RNA, 1003 nt, Artificial Sequence
  CD40LG mRNA product opt10
gggagaaagcuuaccaugaucgaaaccuacaaucaaaccuccccccgcagcgccgcaacaggccuccccaucuccaugaaaaucuucauguaccuccucaccgucuuccuaaucacccaaaugaucggcuccgcccuauucgccgucuaccuccaccgccgccucgacaaaaucgaagacgaacgcaaccuccacgaagacuuugucuucaugaaaacuauccaacgaugcaacaccggcgaacgaucccuaucccuccucaacugcgaagaaauaaaaucccaauucgaaggauucgucaaagacaucaugcuaaacaaagaagaaaccaaaaaagaaaacuccuucgaaaugcaaaaaggcgaccaaaacccccaaaucgcagcccacgucaucucagaagcaucuuccaaaaccaccuccguccuccaaugggccgaaaaaggcuacuacaccaugucaaacaaccucgucacccucgaaaacggcaaacaacucaccgucaaacgccaaggccucuacuacaucuacgcacaagucaccuucugcuccaaccgcgaagcauccucccaagcccccuucaucgccucccucugccucaaaucccccggccgcuucgaacgcauccuccuccgcgccgcaaauacccacuccuccgccaaaccaugcggccaacaauccauccaccucggcggcgucuucgaacuccaacccggcgccuccgucuucgucaacgucaccgaccccucccaaguaucccauggaaccggcuucaccuccuucggccuccucaaacucuagggacuaguuauaagacugacuagcccgaugggccucccaacgggcccuccuccccuccuugcaccgagauuaauaaaaaaaaaaaaaaaaaaaaaaaaaaaaaaaaaaaaaaaaaaaaaaaaaaaaaaaaaaaaaaaaugcaucccccccccccccccccccccccccccccccaaaggcucuuuucagagccaccagaauu

SEQ ID NO: 276 - RNA, 1249 nt, Artificial Sequence
  PDCD1 mRNA product TOP UTR wild type
ggggcgcugccuacggagguggcagccaucuccuucucggcaucaagcuuaccaugcagaucccacaggcgcccuggccagucgucugggcggugcuacaacugggcuggcggccaggaugguucuuagacuccccagacaggcccuggaacccccccaccuucuccccagcccugcucguggugaccgaaggggacaacgccaccuucaccugcagcuucuccaacacaucggagagcuucgugcuaaacugguaccgcaugagccccagcaaccagacggacaagcuggccgcuuuccccgaggaccgcagccagcccggccaggacugccgcuuccgugucacacaacugcccaacgggcgugacuuccacaugagcguggucagggcccggcgcaaugacagcggcaccuaccucuguggggccaucucccuggcccccaaggcgcagaucaaagagagccugcgggcagagcucagggugacagagagaagggcagaagugcccacagcccaccccagccccucacccaggccagccggccaguuccaaacccuggugguuggugucgugggcggccugcugggcagccuggugcugcuagucuggguccuggccgucaucugcucccgggccgcacgagggacaauaggagccaggcgcaccggccagccccugaaggaggaccccucagccgugccuguguucucuguggacuauggggagcuggauuuccaguggcgagagaagaccccggagccccccgugcccugugucccugagcagacggaguaugccaccauugucuuuccuagcggaaugggcaccucaucccccgcccgcaggggcucagccgacggcccucggagugcccagccacugaggccugaggauggacacugcucuuggccccucugaggacuagugcaucacauuuaaaagcaucucagccuaccaugagaauaagagaaagaaaaugaagaucaauagcuuauucaucucuuuuucuuuuucguugguguaaagccaacacccugucuaaaaaacauaaauuucuuuaaucauuuugccucuuuucucugugcuucaauuaauaaaaaauggaaagaaccuagaucuaaaaaaaaaaaaaaaaaaaaaaaaaaaaaaaaaaaaaaaaaaaaaaaaaaaaaaaaaaaaaaaaugcaucccccccccccccccccccccccccccccccaaaggcucuuuucagagccaccagaauu

SEQ ID NO: 277 - RNA, 832 nt, Artificial Sequence
  PDCD1(1-149) mRNA product TOP UTR wild type
ggggcgcugccuacggagguggcagccaucuccuucucggcaucaagcuuaccaugcagaucccacaggcgcccuggccagucgucugggcggugcuacaacugggcuggcggccaggaugguucuuagacuccccagacaggcccuggaacccccccaccuucuccccagcccugcucguggugaccgaaggggacaacgccaccuucaccugcagcuucuccaacacaucggagagcuucgugcuaaacugguaccgcaugagccccagcaaccagacggacaagcuggccgcuuuccccgaggaccgcagccagcccggccaggacugccgcuuccgugucacacaacugcccaacgggcgugacuuccacaugagcguggucagggcccggcgcaaugacagcggcaccuaccucuguggggccaucucccuggcccccaaggcgcagaucaaagagagccugcgggcagagcucagggugacagagagaagggcaugaggacuagugcaucacauuuaaaagcaucucagccuaccaugagaauaagagaaagaaaaugaagaucaauagcuuauucaucucuuuuucuuuuucguugguguaaagccaacacccugucuaaaaaacauaaauuucuuuaaucauuuugccucuuuucucugugcuucaauuaauaaaaaauggaaagaaccuagaucuaaaaaaaaaaaaaaaaaaaaaaaaaaaaaaaaaaaaaaaaaaaaaaaaaaaaaaaaaaaaaaaaugcaucccccccccccccccccccccccccccccccaaaggcucuuuucagagccaccagaauu

SEQ ID NO: 278 - RNA, 1042 nt, Artificial Sequence
  IL12A mRNA product TOP UTR wild type
ggggcgcugccuacggagguggcagccaucuccuucucggcaucaagcuuaccauguguccagcgcgcagccuccuccuuguggcuacccugguccuccuggaccaccucaguuuggccagaaaccuccccguggccacuccagacccaggaauguucccaugccuucaccacucccaaaaccugcugagggccgucagcaacaugcuccagaaggccagacaaacucuagaauuuuacccuugcacuucugaagagauugaucaugaagauaucacaaaagauaaaaccagcacaguggaggccuguuuaccauuggaauuaaccaagaaugagaguugccuaaauuccagagagaccucuuucauaacuaaugggaguugccuggccuccagaaagaccucuuuuaugauggcccugugccuuaguaguauuuaugaagacuugaagauguaccagguggaguucaagaccaugaaugcaaagcuucugauggauccuaagaggcagaucuuucuagaucaaaacaugcuggcaguuauugaugagcugaugcaggcccugaauuucaacagugagacugugccacaaaaauccucccuugaagaaccggauuuuuauaaaacuaaaaucaagcucugcauacuucuucaugcuuucagaauucgggcagugacuauugauagagugaugagcuaucugaaugcuuccuaaggacuagugcaucacauuuaaaagcaucucagccuaccaugagaauaagagaaagaaaaugaagaucaauagcuuauucaucucuuuuucuuuuucguugguguaaagccaacacccugucuaaaaaacauaaauuucuuuaaucauuuugccucuuuucucugugcuucaauuaauaaaaaauggaaagaaccuagaucuaaaaaaaaaaaaaaaaaaaaaaaaaaaaaaaaaaaaaaaaaaaaaaaaaaaaaaaaaaaaaaaaugcaucccccccccccccccccccccccccccccccaaaggcucuuuucagagccaccagaauu

SEQ ID NO: 279 - RNA, 1039 nt, Artificial Sequence
  IL12A(1-219) mRNA product TOP UTR wild type
ggggcgcugccuacggagguggcagccaucuccuucucggcaucaagcuuaccauguguccagcgcgcagccuccuccuuguggcuacccugguccuccuggaccaccucaguuuggccagaaaccuccccguggccacuccagacccaggaauguucccaugccuucaccacucccaaaaccugcugagggccgucagcaacaugcuccagaaggccagacaaacucuagaauuuuacccuugcacuucugaagagauugaucaugaagauaucacaaaagauaaaaccagcacaguggaggccuguuuaccauuggaauuaaccaagaaugagaguugccuaaauuccagagagaccucuuucauaacuaaugggaguugccuggccuccagaaagaccucuuuuaugauggcccugugccuuaguaguauuuaugaagacuugaagauguaccagguggaguucaagaccaugaaugcaaagcuucugauggauccuaagaggcagaucuuucuagaucaaaacaugcuggcaguuauugaugagcugaugcaggcccugaauuucaacagugagacugugccacaaaaauccucccuugaagaaccggauuuuuauaaaacuaaaaucaagcucugcauacuucuucaugcuuucagaauucgggcagugacuauugauagagugaugagcuaucugaaugcuuccggacuagugcaucacauuuaaaagcaucucagccuaccaugagaauaagagaaagaaaaugaagaucaauagcuuauucaucucuuuuucuuuuucguugguguaaagccaacacccugucuaaaaaacauaaauuucuuuaaucauuuugccucuuuucucugugcuucaauuaauaaaaaauggaaagaaccuagaucuaaaaaaaaaaaaaaaaaaaaaaaaaaaaaaaaaaaaaaaaaaaaaaaaaaaaaaaaaaaaaaaaugcaucccccccccccccccccccccccccccccccaaaggcucuuuucagagccaccagaauu

SEQ ID NO: 280 - RNA, 976 nt, Artificial Sequence
  IL12A(23-219) mRNA product TOP UTR wild type
ggggcgcugccuacggagguggcagccaucuccuucucggcaucaagcuuaccagaaaccuccccguggccacuccagacccaggaauguucccaugccuucaccacucccaaaaccugcugagggccgucagcaacaugcuccagaaggccagacaaacucuagaauuuuacccuugcacuucugaagagauugaucaugaagauaucacaaaagauaaaaccagcacaguggaggccuguuuaccauuggaauuaaccaagaaugagaguugccuaaauuccagagagaccucuuucauaacuaaugggaguugccuggccuccagaaagaccucuuuuaugauggcccugugccuuaguaguauuuaugaagacuugaagauguaccagguggaguucaagaccaugaaugcaaagcuucugauggauccuaagaggcagaucuuucuagaucaaaacaugcuggcaguuauugaugagcugaugcaggcccugaauuucaacagugagacugugccacaaaaauccucccuugaagaaccggauuuuuauaaaacuaaaaucaagcucugcauacuucuucaugcuuucagaauucgggcagugacuauugauagagugaugagcuaucugaaugcuuccuaaggacuagugcaucacauuuaaaagcaucucagccuaccaugagaauaagagaaagaaaaugaagaucaauagcuuauucaucucuuuuucuuuuucguugguguaaagccaacacccugucuaaaaaacauaaauuucuuuaaucauuuugccucuuuucucugugcuucaauuaauaaaaaauggaaagaaccuagaucuaaaaaaaaaaaaaaaaaaaaaaaaaaaaaaaaaaaaaaaaaaaaaaaaaaaaaaaaaaaaaaaaugcaucccccccccccccccccccccccccccccccaaaggcucuuuucagagccaccagaauu

SEQ ID NO: 281 - RNA, 1369 nt, Artificial Sequence
  IL12B mRNA product TOP UTR wild type
ggggcgcugccuacggagguggcagccaucuccuucucggcaucaagcuuaccaugugucaccagcaguuggucaucucuugguuuucccugguuuuucuggcaucuccccucguggccauaugggaacugaagaaagauguuuaugucguagaauuggauugguauccggaugccccuggagaaauggugguccucaccugugacaccccugaagaagaugguaucaccuggaccuuggaccagagcagugaggucuuaggcucuggcaaaacccugaccauccaagucaaagaguuuggagaugcuggccaguacaccugucacaaaggaggcgagguucuaagccauucgcuccugcugcuucacaaaaaggaagauggaauuugguccacugauauuuuaaaggaccagaaagaacccaaaaauaagaccuuucuaagaugcgaggccaagaauuauucuggacguuucaccugcugguggcugacgacaaucaguacugauuugacauucagugucaaaagcagcagaggcucuucugacccccaaggggugacgugcggagcugcuacacucucugcagagagagucagaggggacaacaaggaguaugaguacucaguggagugccaggaggacagugccugcccagcugcugaggagagucugcccauugaggucaugguggaugccguucacaagcucaaguaugaaaacuacaccagcagcuucuucaucagggacaucaucaaaccugacccacccaagaacuugcagcugaagccauuaaagaauucucggcagguggaggucagcugggaguacccugacaccuggaguacuccacauuccuacuucucccugacauucugcguucagguccagggcaagagcaagagagaaaagaaagauagagucuucacggacaagaccucagccacggucaucugccgcaaaaaugccagcauuagcgugcgggcccaggaccgcuacuauagcucaucuuggagcgaaugggcaucugugcccugcaguuagggacuagugcaucacauuuaaaagcaucucagccuaccaugagaauaagagaaagaaaaugaagaucaauagcuuauucaucucuuuuucuuuuucguugguguaaagccaacacccugucuaaaaaacauaaauuucuuuaaucauuuugccucuuuucucugugcuucaauuaauaaaaaauggaaagaaccuagaucuaaaaaaaaaaaaaaaaaaaaaaaaaaaaaaaaaaaaaaaaaaaaaaaaaaaaaaaaaaaaaaaaugcaucccccccccccccccccccccccccccccccaaaggcucuuuucagagccaccagaauu

SEQ ID NO: 282 - RNA, 1366 nt, Artificial Sequence
  IL12B(1-328) mRNA product TOP UTR wild type
ggggcgcugccuacggagguggcagccaucuccuucucggcaucaagcuuaccaugugucaccagcaguuggucaucucuugguuuucccugguuuuucuggcaucuccccucguggccauaugggaacugaagaaagauguuuaugucguagaauuggauugguauccggaugccccuggagaaauggugguccucaccugugacaccccugaagaagaugguaucaccuggaccuuggaccagagcagugaggucuuaggcucuggcaaaacccugaccauccaagucaaagaguuuggagaugcuggccaguacaccugucacaaaggaggcgagguucuaagccauucgcuccugcugcuucacaaaaaggaagauggaauuugguccacugauauuuuaaaggaccagaaagaacccaaaaauaagaccuuucuaagaugcgaggccaagaauuauucuggacguuucaccugcugguggcugacgacaaucaguacugauuugacauucagugucaaaagcagcagaggcucuucugacccccaaggggugacgugcggagcugcuacacucucugcagagagagucagaggggacaacaaggaguaugaguacucaguggagugccaggaggacagugccugcccagcugcugaggagagucugcccauugaggucaugguggaugccguucacaagcucaaguaugaaaacuacaccagcagcuucuucaucagggacaucaucaaaccugacccacccaagaacuugcagcugaagccauuaaagaauucucggcagguggaggucagcugggaguacccugacaccuggaguacuccacauuccuacuucucccugacauucugcguucagguccagggcaagagcaagagagaaaagaaagauagagucuucacggacaagaccucagccacggucaucugccgcaaaaaugccagcauuagcgugcgggcccaggaccgcuacuauagcucaucuuggagcgaaugggcaucugugcccugcaguggacuagugcaucacauuuaaaagcaucucagccuaccaugagaauaagagaaagaaaaugaagaucaauagcuuauucaucucuuuuucuuuuucguugguguaaagccaacacccugucuaaaaaacauaaauuucuuuaaucauuuugccucuuuucucugugcuucaauuaauaaaaaauggaaagaaccuagaucuaaaaaaaaaaaaaaaaaaaaaaaaaaaaaaaaaaaaaaaaaaaaaaaaaaaaaaaaaaaaaaaaugcaucccccccccccccccccccccccccccccccaaaggcucuuuucagagccaccagaauu

SEQ ID NO: 283 - RNA, 1303 nt, Artificial Sequence
  IL12B(23-328) mRNA product TOP UTR wild type
ggggcgcugccuacggagguggcagccaucuccuucucggcaucaagcuuaccauaugggaacugaagaaagauguuuaugucguagaauuggauugguauccggaugccccuggagaaauggugguccucaccugugacaccccugaagaagaugguaucaccuggaccuuggaccagagcagugaggucuuaggcucuggcaaaacccugaccauccaagucaaagaguuuggagaugcuggccaguacaccugucacaaaggaggcgagguucuaagccauucgcuccugcugcuucacaaaaaggaagauggaauuugguccacugauauuuuaaaggaccagaaagaacccaaaaauaagaccuuucuaagaugcgaggccaagaauuauucuggacguuucaccugcugguggcugacgacaaucaguacugauuugacauucagugucaaaagcagcagaggcucuucugacccccaaggggugacgugcggagcugcuacacucucugcagagagagucagaggggacaacaaggaguaugaguacucaguggagugccaggaggacagugccugcccagcugcugaggagagucugcccauugaggucaugguggaugccguucacaagcucaaguaugaaaacuacaccagcagcuucuucaucagggacaucaucaaaccugacccacccaagaacuugcagcugaagccauuaaagaauucucggcagguggaggucagcugggaguacccugacaccuggaguacuccacauuccuacuucucccugacauucugcguucagguccagggcaagagcaagagagaaaagaaagauagagucuucacggacaagaccucagccacggucaucugccgcaaaaaugccagcauuagcgugcgggcccaggaccgcuacuauagcucaucuuggagcgaaugggcaucugugcccugcaguuagggacuagugcaucacauuuaaaagcaucucagccuaccaugagaauaagagaaagaaaaugaagaucaauagcuuauucaucucuuuuucuuuuucguugguguaaagccaacacccugucuaaaaaacauaaauuucuuuaaucauuuugccucuuuucucugugcuucaauuaauaaaaaauggaaagaaccuagaucuaaaaaaaaaaaaaaaaaaaaaaaaaaaaaaaaaaaaaaaaaaaaaaaaaaaaaaaaaaaaaaaaugcaucccccccccccccccccccccccccccccccaaaggcucuuuucagagccaccagaauu

SEQ ID NO: 284 - RNA, 436 nt, Artificial Sequence
  Linker-sFvCC49-218 mRNA product TOP UTR wild type
ggggcgcugccuacggagguggcagccaucuccuucucggcaucaagcuuaccggcaguacuucgggcagugguaagccugguaguggugaggguaguacuaaggguggacuagugcaucacauuuaaaagcaucucagccuaccaugagaauaagagaaagaaaaugaagaucaauagcuuauucaucucuuuuucuuuuucguugguguaaagccaacacccugucuaaaaaacauaaauuucuuuaaucauuuugccucuuuucucugugcuucaauuaauaaaaaauggaaagaaccuagaucuaaaaaaaaaaaaaaaaaaaaaaaaaaaaaaaaaaaaaaaaaaaaaaaaaaaaaaaaaaaaaaaaugcaucccccccccccccccccccccccccccccccaaaggcucuuuucagagccaccagaauu

SEQ ID NO: 285 - RNA, 2014 nt, Artificial Sequence
  IL12 mRNA product TOP UTR wild type
ggggcgcugccuacggagguggcagccaucuccuucucggcaucaagcuuaccaugugucaccagcaguuggucaucucuugguuuucccugguuuuucuggcaucuccccucguggccauaugggaacugaagaaagauguuuaugucguagaauuggauugguauccggaugccccuggagaaauggugguccucaccugugacaccccugaagaagaugguaucaccuggaccuuggaccagagcagugaggucuuaggcucuggcaaaacccugaccauccaagucaaagaguuuggagaugcuggccaguacaccugucacaaaggaggcgagguucuaagccauucgcuccugcugcuucacaaaaaggaagauggaauuugguccacugauauuuuaaaggaccagaaagaacccaaaaauaagaccuuucuaagaugcgaggccaagaauuauucuggacguuucaccugcugguggcugacgacaaucaguacugauuugacauucagugucaaaagcagcagaggcucuucugacccccaaggggugacgugcggagcugcuacacucucugcagagagagucagaggggacaacaaggaguaugaguacucaguggagugccaggaggacagugccugcccagcugcugaggagagucugcccauugaggucaugguggaugccguucacaagcucaaguaugaaaacuacaccagcagcuucuucaucagggacaucaucaaaccugacccacccaagaacuugcagcugaagccauuaaagaauucucggcagguggaggucagcugggaguacccugacaccuggaguacuccacauuccuacuucucccugacauucugcguucagguccagggcaagagcaagagagaaaagaaagauagagucuucacggacaagaccucagccacggucaucugccgcaaaaaugccagcauuagcgugcgggcccaggaccgcuacuauagcucaucuuggagcgaaugggcaucugugcccugcaguggcaguacuucgggcagugguaagccugguaguggugaggguaguacuaaggguagaaaccuccccguggccacuccagacccaggaauguucccaugccuucaccacucccaaaaccugcugagggccgucagcaacaugcuccagaaggccagacaaacucuagaauuuuacccuugcacuucugaagagauugaucaugaagauaucacaaaagauaaaaccagcacaguggaggccuguuuaccauuggaauuaaccaagaaugagaguugccuaaauuccagagagaccucuuucauaacuaaugggaguugccuggccuccagaaagaccucuuuuaugauggcccugugccuuaguaguauuuaugaagacuugaagauguaccagguggaguucaagaccaugaaugcaaagcuucugauggauccuaagaggcagaucuuucuagaucaaaacaugcuggcaguuauugaugagcugaugcaggcccugaauuucaacagugagacugugccacaaaaauccucccuugaagaaccggauuuuuauaaaacuaaaaucaagcucugcauacuucuucaugcuuucagaauucgggcagugacuauugauagagugaugagcuaucugaaugcuuccuaaggacuagugcaucacauuuaaaagcaucucagccuaccaugagaauaagagaaagaaaaugaagaucaauagcuuauucaucucuuuuucuuuuucguugguguaaagccaacacccugucuaaaaaacauaaauuucuuuaaucauuuugccucuuuucucugugcuucaauuaauaaaaaauggaaagaaccuagaucuaaaaaaaaaaaaaaaaaaaaaaaaaaaaaaaaaaaaaaaaaaaaaaaaaaaaaaaaaaaaaaaaugcaucccccccccccccccccccccccccccccccaaaggcucuuuucagagccaccagaauu

SEQ ID NO: 286 - RNA, 1168 nt, Artificial Sequence
  CD40LG mRNA product TOP UTR wild type
ggggcgcugccuacggagguggcagccaucuccuucucggcaucaagcuuaccaugaucgaaacauacaaccaaacuucuccccgaucugcggccacuggacugcccaucagcaugaaaauuuuuauguauuuacuuacuguuuuucuuaucacccagaugauugggucagcacuuuuugcuguguaucuucauagaagguuggacaagauagaagaugaaaggaaucuucaugaagauuuuguauucaugaaaacgauacagagaugcaacacaggagaaagauccuuauccuuacugaacugugaggagauuaaaagccaguuugaaggcuuugugaaggauauaauguuaaacaaagaggagacgaagaaagaaaacagcuuugaaaugcaaaaaggugaucagaauccucaaauugcggcacaugucauaagugaggccagcaguaaaacaacaucuguguuacagugggcugaaaaaggauacuacaccaugagcaacaacuugguaacccuggaaaaugggaaacagcugaccguuaaaagacaaggacucuauuauaucuaugcccaagucaccuucuguuccaaucgggaagcuucgagucaagcuccauuuauagccagccucugccuaaagucccccgguagauucgagagaaucuuacucagagcugcaaauacccacaguuccgccaaaccuugcgggcaacaauccauucacuugggaggaguauuugaauugcaaccaggugcuucgguguuugucaaugugacugauccaagccaagugagccauggcacuggcuucacguccuuuggcuuacucaaacucugaggacuagugcaucacauuuaaaagcaucucagccuaccaugagaauaagagaaagaaaaugaagaucaauagcuuauucaucucuuuuucuuuuucguugguguaaagccaacacccugucuaaaaaacauaaauuucuuuaaucauuuugccucuuuucucugugcuucaauuaauaaaaaauggaaagaaccuagaucuaaaaaaaaaaaaaaaaaaaaaaaaaaaaaaaaaaaaaaaaaaaaaaaaaaaaaaaaaaaaaaaaugcaucccccccccccccccccccccccccccccccaaaggcucuuuucagagccaccagaauu

SEQ ID NO: 287 - RNA, 1249 nt, Artificial Sequence
  PDCD1 mRNA product TOP UTR opt1
ggggcgcugccuacggagguggcagccaucuccuucucggcaucaagcuuaccaugcagaucccccaggccccguggcccguggucugggccgugcugcagcucggcuggcgccccgggugguuccuggacagccccgaccggccguggaacccgcccaccuucucccccgcgcugcucguggucaccgagggcgacaacgccacguucacgugcagcuucuccaacaccagcgaguccuucgugcugaacugguaccgcaugagccccuccaaccagaccgacaagcuggccgccuuccccgaggaccggagccagcccgggcaggacugccgcuuccgggugacccagcuccccaacggccgcgacuuccacauguccgucgugcgggcccgccggaacgacagcgggaccuaccugugcggcgcgaucucccuggccccgaaggcccagaucaaggagagccuccgcgccgagcugcgggugaccgagcgccgggcggagguccccaccgcccaccccucccccagcccgcgccccgccggccaguuccagacgcugguggugggggucgugggcgggcuccugggcucccuggugcuccuggucugggugcuggccgugaucugcagccgggccgcgcgcgggaccaucggcgcccggcgcaccggccagccccucaaggaggaccccuccgccgucccgguguucagcguggacuacggggagcuggacuuccaguggcgggagaagacccccgagccgcccguccccugcgugcccgagcagacggaguacgccaccaucguguuccccuccggcauggggaccagcagccccgcccgccggggcuccgcggacggcccgcgcagcgcccagccccugcgccccgaggacgggcacugcuccuggccgcucugaggacuagugcaucacauuuaaaagcaucucagccuaccaugagaauaagagaaagaaaaugaagaucaauagcuuauucaucucuuuuucuuuuucguugguguaaagccaacacccugucuaaaaaacauaaauuucuuuaaucauuuugccucuuuucucugugcuucaauuaauaaaaaauggaaagaaccuagaucuaaaaaaaaaaaaaaaaaaaaaaaaaaaaaaaaaaaaaaaaaaaaaaaaaaaaaaaaaaaaaaaaugcaucccccccccccccccccccccccccccccccaaaggcucuuuucagagccaccagaauu

SEQ ID NO: 288 - RNA, 832 nt, Artificial Sequence
  PDCD1(1-149) mRNA product TOP UTR opt1
ggggcgcugccuacggagguggcagccaucuccuucucggcaucaagcuuaccaugcagaucccccaggccccguggcccguggucugggccgugcugcagcucggcuggcgccccgggugguuccuggacagccccgaccggccguggaacccgcccaccuucucccccgcgcugcucguggucaccgagggcgacaacgccacguucacgugcagcuucuccaacaccagcgaguccuucgugcugaacugguaccgcaugagccccuccaaccagaccgacaagcuggccgccuuccccgaggaccggagccagcccgggcaggacugccgcuuccgggugacccagcuccccaacggccgcgacuuccacauguccgucgugcgggcccgccggaacgacagcgggaccuaccugugcggcgcgaucucccuggccccgaaggcccagaucaaggagagccuccgcgccgagcugcgggugaccgagcgccgggcgugaggacuagugcaucacauuuaaaagcaucucagccuaccaugagaauaagagaaagaaaaugaagaucaauagcuuauucaucucuuuuucuuuuucguugguguaaagccaacacccugucuaaaaaacauaaauuucuuuaaucauuuugccucuuuucucugugcuucaauuaauaaaaaauggaaagaaccuagaucuaaaaaaaaaaaaaaaaaaaaaaaaaaaaaaaaaaaaaaaaaaaaaaaaaaaaaaaaaaaaaaaaugcaucccccccccccccccccccccccccccccccaaaggcucuuuucagagccaccagaauu

SEQ ID NO: 289 - RNA, 1042 nt, Artificial Sequence
  IL12A mRNA product TOP UTR opt1
ggggcgcugccuacggagguggcagccaucuccuucucggcaucaagcuuaccaugugccccgcccgcagccugcuccugguggccacccugguccuccuggaccaccugucccucgcgcggaaccugccgguggccacccccgaccccggcauguuccccugccugcaccacagccagaaccuccugcgcgccguguccaacaugcugcagaaggcccggcagacgcucgaguucuacccgugcaccagcgaggagaucgaccacgaggacaucaccaaggacaagaccuccacggucgaggccugccugccccuggagcucaccaagaacgagagcugccugaacucccgcgagaccagcuucaucaccaacggguccugccuggcgagccggaagacguccuucaugauggcccucugccugagcuccaucuacgaggaccugaagauguaccagguggaguucaagaccaugaacgccaagcuccugauggaccccaagcgccagaucuuccuggaccagaacaugcucgccgugaucgacgagcugaugcaggcgcugaacuucaacagcgagaccgucccccagaaguccagccucgaggagccggacuucuacaagaccaagaucaagcugugcauccugcuccacgccuuccggauccgcgccgugacgaucgaccgggugauguccuaccugaacgccagcugaggacuagugcaucacauuuaaaagcaucucagccuaccaugagaauaagagaaagaaaaugaagaucaauagcuuauucaucucuuuuucuuuuucguugguguaaagccaacacccugucuaaaaaacauaaauuucuuuaaucauuuugccucuuuucucugugcuucaauuaauaaaaaauggaaagaaccuagaucuaaaaaaaaaaaaaaaaaaaaaaaaaaaaaaaaaaaaaaaaaaaaaaaaaaaaaaaaaaaaaaaaugcaucccccccccccccccccccccccccccccccaaaggcucuuuucagagccaccagaauu

SEQ ID NO: 290 - RNA, 1039 nt, Artificial Sequence
  IL12A(1-219) mRNA product TOP UTR opt1
ggggcgcugccuacggagguggcagccaucuccuucucggcaucaagcuuaccaugugccccgcccgcagccugcuccugguggccacccugguccuccuggaccaccugucccucgcgcggaaccugccgguggccacccccgaccccggcauguuccccugccugcaccacagccagaaccuccugcgcgccguguccaacaugcugcagaaggcccggcagacgcucgaguucuacccgugcaccagcgaggagaucgaccacgaggacaucaccaaggacaagaccuccacggucgaggccugccugccccuggagcucaccaagaacgagagcugccugaacucccgcgagaccagcuucaucaccaacggguccugccuggcgagccggaagacguccuucaugauggcccucugccugagcuccaucuacgaggaccugaagauguaccagguggaguucaagaccaugaacgccaagcuccugauggaccccaagcgccagaucuuccuggaccagaacaugcucgccgugaucgacgagcugaugcaggcgcugaacuucaacagcgagaccgucccccagaaguccagccucgaggagccggacuucuacaagaccaagaucaagcugugcauccugcuccacgccuuccggauccgcgccgugacgaucgaccgggugauguccuaccugaacgccagcggacuagugcaucacauuuaaaagcaucucagccuaccaugagaauaagagaaagaaaaugaagaucaauagcuuauucaucucuuuuucuuuuucguugguguaaagccaacacccugucuaaaaaacauaaauuucuuuaaucauuuugccucuuuucucugugcuucaauuaauaaaaaauggaaagaaccuagaucuaaaaaaaaaaaaaaaaaaaaaaaaaaaaaaaaaaaaaaaaaaaaaaaaaaaaaaaaaaaaaaaaugcaucccccccccccccccccccccccccccccccaaaggcucuuuucagagccaccagaauu

SEQ ID NO: 291 - RNA, 976 nt, Artificial Sequence
  IL12A(23-219) mRNA product TOP UTR opt1
ggggcgcugccuacggagguggcagccaucuccuucucggcaucaagcuuacccggaaccugccgguggccacccccgaccccggcauguuccccugccugcaccacagccagaaccuccugcgcgccguguccaacaugcugcagaaggcccggcagacgcucgaguucuacccgugcaccagcgaggagaucgaccacgaggacaucaccaaggacaagaccuccacggucgaggccugccugccccuggagcucaccaagaacgagagcugccugaacucccgcgagaccagcuucaucaccaacggguccugccuggcgagccggaagacguccuucaugauggcccucugccugagcuccaucuacgaggaccugaagauguaccagguggaguucaagaccaugaacgccaagcuccugauggaccccaagcgccagaucuuccuggaccagaacaugcucgccgugaucgacgagcugaugcaggcgcugaacuucaacagcgagaccgucccccagaaguccagccucgaggagccggacuucuacaagaccaagaucaagcugugcauccugcuccacgccuuccggauccgcgccgugacgaucgaccgggugauguccuaccugaacgccagcugaggacuagugcaucacauuuaaaagcaucucagccuaccaugagaauaagagaaagaaaaugaagaucaauagcuuauucaucucuuuuucuuuuucguugguguaaagccaacacccugucuaaaaaacauaaauuucuuuaaucauuuugccucuuuucucugugcuucaauuaauaaaaaauggaaagaaccuagaucuaaaaaaaaaaaaaaaaaaaaaaaaaaaaaaaaaaaaaaaaaaaaaaaaaaaaaaaaaaaaaaaaugcaucccccccccccccccccccccccccccccccaaaggcucuuuucagagccaccagaauu

SEQ ID NO: 292 - RNA, 1369 nt, Artificial Sequence
  IL12B mRNA product TOP UTR opt1
ggggcgcugccuacggagguggcagccaucuccuucucggcaucaagcuuaccaugugccaccagcagcuggugaucagcugguucucccucgucuuccuggccagcccccugguggccaucugggagcucaagaaggacguguacgucguggagcuggacugguacccggacgcgcccggcgagauggugguccugaccugcgacacccccgaggaggacgggaucacguggacccucgaccaguccagcgaggugcugggcuccgggaagacccugaccauccaggugaaggaguucggcgacgccgggcaguacacgugccacaagggcggcgagguccucagccacucccugcugcuccugcacaagaaggaggacgggaucuggagcaccgacauccugaaggaccagaaggagcccaagaacaagaccuuccuccgcugcgaggccaagaacuacuccggccgguucacgugcugguggcugaccaccaucagcaccgaccugaccuucuccgucaagagcucccgcgggagcuccgacccgcagggcgugacgugcggggccgccacccucagcgcggagcgggugcgcggcgacaacaaggaguacgaguacuccguggagugccaggaggacagcgccugccccgccgccgaggagucccugcccaucgaggugauggucgacgcggugcacaagcugaaguacgagaacuacaccagcagcuucuucauccgggacaucaucaagcccgacccgcccaagaaccuccagcugaagccccugaagaacucccgccagguggaggucagcugggaguaccccgacaccugguccacgccgcacagcuacuucucccucaccuucugcguccaggugcagggcaagagcaagcgggagaagaaggaccgcguguucaccgacaagaccuccgccacggugaucugccggaagaacgccagcaucuccgugcgcgcccaggaccgguacuacagcuccagcugguccgagugggccagcguccccugcuccugaggacuagugcaucacauuuaaaagcaucucagccuaccaugagaauaagagaaagaaaaugaagaucaauagcuuauucaucucuuuuucuuuuucguugguguaaagccaacacccugucuaaaaaacauaaauuucuuuaaucauuuugccucuuuucucugugcuucaauuaauaaaaaauggaaagaaccuagaucuaaaaaaaaaaaaaaaaaaaaaaaaaaaaaaaaaaaaaaaaaaaaaaaaaaaaaaaaaaaaaaaaugcaucccccccccccccccccccccccccccccccaaaggcucuuuucagagccaccagaauu

SEQ ID NO: 293 - RNA, 1366 nt, Artificial Sequence
  IL12B(1-328) mRNA product TOP UTR opt1
ggggcgcugccuacggagguggcagccaucuccuucucggcaucaagcuuaccaugugccaccagcagcuggugaucagcugguucucccucgucuuccuggccagcccccugguggccaucugggagcucaagaaggacguguacgucguggagcuggacugguacccggacgcgcccggcgagauggugguccugaccugcgacacccccgaggaggacgggaucacguggacccucgaccaguccagcgaggugcugggcuccgggaagacccugaccauccaggugaaggaguucggcgacgccgggcaguacacgugccacaagggcggcgagguccucagccacucccugcugcuccugcacaagaaggaggacgggaucuggagcaccgacauccugaaggaccagaaggagcccaagaacaagaccuuccuccgcugcgaggccaagaacuacuccggccgguucacgugcugguggcugaccaccaucagcaccgaccugaccuucuccgucaagagcucccgcgggagcuccgacccgcagggcgugacgugcggggccgccacccucagcgcggagcgggugcgcggcgacaacaaggaguacgaguacuccguggagugccaggaggacagcgccugccccgccgccgaggagucccugcccaucgaggugauggucgacgcggugcacaagcugaaguacgagaacuacaccagcagcuucuucauccgggacaucaucaagcccgacccgcccaagaaccuccagcugaagccccugaagaacucccgccagguggaggucagcugggaguaccccgacaccugguccacgccgcacagcuacuucucccucaccuucugcguccaggugcagggcaagagcaagcgggagaagaaggaccgcguguucaccgacaagaccuccgccacggugaucugccggaagaacgccagcaucuccgugcgcgcccaggaccgguacuacagcuccagcugguccgagugggccagcguccccugcuccggacuagugcaucacauuuaaaagcaucucagccuaccaugagaauaagagaaagaaaaugaagaucaauagcuuauucaucucuuuuucuuuuucguugguguaaagccaacacccugucuaaaaaacauaaauuucuuuaaucauuuugccucuuuucucugugcuucaauuaauaaaaaauggaaagaaccuagaucuaaaaaaaaaaaaaaaaaaaaaaaaaaaaaaaaaaaaaaaaaaaaaaaaaaaaaaaaaaaaaaaaugcaucccccccccccccccccccccccccccccccaaaggcucuuuucagagccaccagaauu

SEQ ID NO: 294 - RNA, 1303 nt, Artificial Sequence
  IL12B(23-328) mRNA product TOP UTR opt1
ggggcgcugccuacggagguggcagccaucuccuucucggcaucaagcuuaccaucugggagcucaagaaggacguguacgucguggagcuggacugguacccggacgcgcccggcgagauggugguccugaccugcgacacccccgaggaggacgggaucacguggacccucgaccaguccagcgaggugcugggcuccgggaagacccugaccauccaggugaaggaguucggcgacgccgggcaguacacgugccacaagggcggcgagguccucagccacucccugcugcuccugcacaagaaggaggacgggaucuggagcaccgacauccugaaggaccagaaggagcccaagaacaagaccuuccuccgcugcgaggccaagaacuacuccggccgguucacgugcugguggcugaccaccaucagcaccgaccugaccuucuccgucaagagcucccgcgggagcuccgacccgcagggcgugacgugcggggccgccacccucagcgcggagcgggugcgcggcgacaacaaggaguacgaguacuccguggagugccaggaggacagcgccugccccgccgccgaggagucccugcccaucgaggugauggucgacgcggugcacaagcugaaguacgagaacuacaccagcagcuucuucauccgggacaucaucaagcccgacccgcccaagaaccuccagcugaagccccugaagaacucccgccagguggaggucagcugggaguaccccgacaccugguccacgccgcacagcuacuucucccucaccuucugcguccaggugcagggcaagagcaagcgggagaagaaggaccgcguguucaccgacaagaccuccgccacggugaucugccggaagaacgccagcaucuccgugcgcgcccaggaccgguacuacagcuccagcugguccgagugggccagcguccccugcuccugaggacuagugcaucacauuuaaaagcaucucagccuaccaugagaauaagagaaagaaaaugaagaucaauagcuuauucaucucuuuuucuuuuucguugguguaaagccaacacccugucuaaaaaacauaaauuucuuuaaucauuuugccucuuuucucugugcuucaauuaauaaaaaauggaaagaaccuagaucuaaaaaaaaaaaaaaaaaaaaaaaaaaaaaaaaaaaaaaaaaaaaaaaaaaaaaaaaaaaaaaaaugcaucccccccccccccccccccccccccccccccaaaggcucuuuucagagccaccagaauu

SEQ ID NO: 295 - RNA, 436 nt, Artificial Sequence
  Linker-sFvCC49-218 mRNA product TOP UTR opt1
ggggcgcugccuacggagguggcagccaucuccuucucggcaucaagcuuaccggcagcaccuccgggagcggcaagcccggguccggcgaggggagcaccaagggcggacuagugcaucacauuuaaaagcaucucagccuaccaugagaauaagagaaagaaaaugaagaucaauagcuuauucaucucuuuuucuuuuucguugguguaaagccaacacccugucuaaaaaacauaaauuucuuuaaucauuuugccucuuuucucugugcuucaauuaauaaaaaauggaaagaaccuagaucuaaaaaaaaaaaaaaaaaaaaaaaaaaaaaaaaaaaaaaaaaaaaaaaaaaaaaaaaaaaaaaaaugcaucccccccccccccccccccccccccccccccaaaggcucuuuucagagccaccagaauu

SEQ ID NO: 296 - RNA, 2014 nt, Artificial Sequence
  IL12 mRNA product TOP UTR opt1
ggggcgcugccuacggagguggcagccaucuccuucucggcaucaagcuuaccaugugccaccagcagcuggugaucagcugguucucccucgucuuccuggccagcccccugguggccaucugggagcucaagaaggacguguacgucguggagcuggacugguacccggacgcgcccggcgagauggugguccugaccugcgacacccccgaggaggacgggaucacguggacccucgaccaguccagcgaggugcugggcuccgggaagacccugaccauccaggugaaggaguucggcgacgccgggcaguacacgugccacaagggcggcgagguccucagccacucccugcugcuccugcacaagaaggaggacgggaucuggagcaccgacauccugaaggaccagaaggagcccaagaacaagaccuuccuccgcugcgaggccaagaacuacuccggccgguucacgugcugguggcugaccaccaucagcaccgaccugaccuucuccgucaagagcucccgcgggagcuccgacccgcagggcgugacgugcggggccgccacccucagcgcggagcgggugcgcggcgacaacaaggaguacgaguacuccguggagugccaggaggacagcgccugccccgccgccgaggagucccugcccaucgaggugauggucgacgcggugcacaagcugaaguacgagaacuacaccagcagcuucuucauccgggacaucaucaagcccgacccgcccaagaaccuccagcugaagccccugaagaacucccgccagguggaggucagcugggaguaccccgacaccugguccacgccgcacagcuacuucucccucaccuucugcguccaggugcagggcaagagcaagcgggagaagaaggaccgcguguucaccgacaagaccuccgccacggugaucugccggaagaacgccagcaucuccgugcgcgcccaggaccgguacuacagcuccagcugguccgagugggccagcguccccugcuccggcagcaccuccgggagcggcaagcccggguccggcgaggggagcaccaagggccggaaccugccgguggccacccccgaccccggcauguuccccugccugcaccacagccagaaccuccugcgcgccguguccaacaugcugcagaaggcccggcagacgcucgaguucuacccgugcaccagcgaggagaucgaccacgaggacaucaccaaggacaagaccuccacggucgaggccugccugccccuggagcucaccaagaacgagagcugccugaacucccgcgagaccagcuucaucaccaacggguccugccuggcgagccggaagacguccuucaugauggcccucugccugagcuccaucuacgaggaccugaagauguaccagguggaguucaagaccaugaacgccaagcuccugauggaccccaagcgccagaucuuccuggaccagaacaugcucgccgugaucgacgagcugaugcaggcgcugaacuucaacagcgagaccgucccccagaaguccagccucgaggagccggacuucuacaagaccaagaucaagcugugcauccugcuccacgccuuccggauccgcgccgugacgaucgaccgggugauguccuaccugaacgccagcugaggacuagugcaucacauuuaaaagcaucucagccuaccaugagaauaagagaaagaaaaugaagaucaauagcuuauucaucucuuuuucuuuuucguugguguaaagccaacacccugucuaaaaaacauaaauuucuuuaaucauuuugccucuuuucucugugcuucaauuaauaaaaaauggaaagaaccuagaucuaaaaaaaaaaaaaaaaaaaaaaaaaaaaaaaaaaaaaaaaaaaaaaaaaaaaaaaaaaaaaaaaugcaucccccccccccccccccccccccccccccccaaaggcucuuuucagagccaccagaauu

SEQ ID NO: 297 - RNA, 1168 nt, Artificial Sequence
  CD40LG mRNA product TOP UTR opt1
ggggcgcugccuacggagguggcagccaucuccuucucggcaucaagcuuaccaugaucgagaccuacaaccagaccagcccccgcuccgccgccacgggccugccgaucagcaugaagaucuucauguaccuccugaccguguuccugaucacccagaugaucggguccgcgcuguucgccgucuaccugcaccggcgccuggacaagaucgaggacgagcggaaccuccacgaggacuucguguucaugaagaccauccagcgcugcaacacgggcgagcggagccugucccugcucaacugcgaggagaucaagagccaguucgagggguucgugaaggacaucaugcugaacaaggaggagaccaagaaggagaacuccuucgagaugcagaagggcgaccagaacccccagaucgccgcccacgucaucagcgaggccuccagcaagaccaccuccgugcugcagugggcggagaagggguacuacacgaugagcaacaaccucgugacccuggagaacggcaagcagcugaccgucaagcgccagggccucuacuacaucuacgcccaggugaccuucugcuccaaccgggaggccagcucccaggcccccuucaucgcgagccugugccugaagucccccgggcgcuucgagcggauccuccugcgcgccgccaacacgcacagcuccgccaagccgugcggccagcagagcauccaccucgggggcguguucgagcuccagcccggggccagcgucuucgugaacgugaccgaccccucccaggucagccacggcaccggcuucaccuccuucgggcugcugaagcucugaggacuagugcaucacauuuaaaagcaucucagccuaccaugagaauaagagaaagaaaaugaagaucaauagcuuauucaucucuuuuucuuuuucguugguguaaagccaacacccugucuaaaaaacauaaauuucuuuaaucauuuugccucuuuucucugugcuucaauuaauaaaaaauggaaagaaccuagaucuaaaaaaaaaaaaaaaaaaaaaaaaaaaaaaaaaaaaaaaaaaaaaaaaaaaaaaaaaaaaaaaaugcaucccccccccccccccccccccccccccccccaaaggcucuuuucagagccaccagaauu

SEQ ID NO: 298 - RNA, 1249 nt, Artificial Sequence
  PDCD1 mRNA product TOP UTR opt2
ggggcgcugccuacggagguggcagccaucuccuucucggcaucaagcuuaccaugcagaucccccaggcccccuggcccgucgucugggccguccuccagcucggcuggcgccccggcugguuccucgacucccccgaccgccccuggaacccccccaccuucucccccgcccuccucgucgucaccgagggcgacaacgccaccuucaccuguuccuucuccaacaccuccgaguccuucguccucaacugguaccgcaugucccccuccaaccagaccgacaagcucgccgccuuccccgaggaccgcucccagcccggccaggacugccgcuuccgcgucacccagcuccccaacggccgcgacuuccacauguccgucguccgcgcccgccgcaacgacuccggcaccuaccucugcggcgccaucucccucgcccccaaggcccagaucaaggagucccuccgcgccgagcuccgcgucaccgagcgccgcgccgagguccccaccgcccaccccucccccuccccccgccccgccggccaguuccagacccucgucgucggcgucgucggcggccuccucggcucccucguccuccucgucuggguccucgccgucaucugcucccgcgccgcccgcggcaccaucggcgcccgccgcaccggccagccccucaaggaggaccccuccgccguccccgucuucuccgucgacuacggcgagcucgacuuccaguggcgcgagaagacccccgagccccccguccccugcguccccgagcagaccgaguacgccaccaucgucuuccccuccggcaugggcaccuccucccccgcccgccgcggcuccgccgacggcccccgcuccgcccagccccuccgccccgaggacggccacugcuccuggccccucugaggacuagugcaucacauuuaaaagcaucucagccuaccaugagaauaagagaaagaaaaugaagaucaauagcuuauucaucucuuuuucuuuuucguugguguaaagccaacacccugucuaaaaaacauaaauuucuuuaaucauuuugccucuuuucucugugcuucaauuaauaaaaaauggaaagaaccuagaucuaaaaaaaaaaaaaaaaaaaaaaaaaaaaaaaaaaaaaaaaaaaaaaaaaaaaaaaaaaaaaaaaugcaucccccccccccccccccccccccccccccccaaaggcucuuuucagagccaccagaauu

SEQ ID NO: 299 - RNA, 832 nt, Artificial Sequence
  PDCD1(1-149) mRNA product TOP UTR opt2
ggggcgcugccuacggagguggcagccaucuccuucucggcaucaagcuuaccaugcagaucccccaggcccccuggcccgucgucugggccguccuccagcucggcuggcgccccggcugguuccucgacucccccgaccgccccuggaacccccccaccuucucccccgcccuccucgucgucaccgagggcgacaacgccaccuucaccuguuccuucuccaacaccuccgaguccuucguccucaacugguaccgcaugucccccuccaaccagaccgacaagcucgccgccuuccccgaggaccgcucccagcccggccaggacugccgcuuccgcgucacccagcuccccaacggccgcgacuuccacauguccgucguccgcgcccgccgcaacgacuccggcaccuaccucugcggcgccaucucccucgcccccaaggcccagaucaaggagucccuccgcgccgagcuccgcgucaccgagcgccgcgccugaggacuagugcaucacauuuaaaagcaucucagccuaccaugagaauaagagaaagaaaaugaagaucaauagcuuauucaucucuuuuucuuuuucguugguguaaagccaacacccugucuaaaaaacauaaauuucuuuaaucauuuugccucuuuucucugugcuucaauuaauaaaaaauggaaagaaccuagaucuaaaaaaaaaaaaaaaaaaaaaaaaaaaaaaaaaaaaaaaaaaaaaaaaaaaaaaaaaaaaaaaaugcaucccccccccccccccccccccccccccccccaaaggcucuuuucagagccaccagaauu

SEQ ID NO: 300 - RNA, 1042 nt, Artificial Sequence
  IL12A mRNA product TOP UTR opt2
ggggcgcugccuacggagguggcagccaucuccuucucggcaucaagcuuaccaugugccccgcccgcucccuccuccucgucgccacccucguccuccucgaccaccucucccucgcccgcaaccuccccgucgccacccccgaccccggcauguuccccugccuccaccacucccagaaccuccuccgcgccgucuccaacaugcuccagaaggcccgccagacccucgaguucuaccccugcaccuccgaggagaucgaccacgaggacaucaccaaggacaagaccuccaccgucgaggccugccucccccucgagcucaccaagaacgaguccugccucaacucccgcgagaccuccuucaucaccaacggcuccugccucgccucccgcaagaccuccuucaugauggcccucugccucuccuccaucuacgaggaccucaagauguaccaggucgaguucaagaccaugaacgccaagcuccucauggaccccaagcgccagaucuuccucgaccagaacaugcucgccgucaucgacgagcucaugcaggcccucaacuucaacuccgagaccgucccccagaaguccucccucgaggagcccgacuucuacaagaccaagaucaagcucugcauccuccuccacgccuuccgcauccgcgccgucaccaucgaccgcgucauguccuaccucaacgccuccugaggacuagugcaucacauuuaaaagcaucucagccuaccaugagaauaagagaaagaaaaugaagaucaauagcuuauucaucucuuuuucuuuuucguugguguaaagccaacacccugucuaaaaaacauaaauuucuuuaaucauuuugccucuuuucucugugcuucaauuaauaaaaaauggaaagaaccuagaucuaaaaaaaaaaaaaaaaaaaaaaaaaaaaaaaaaaaaaaaaaaaaaaaaaaaaaaaaaaaaaaaaugcaucccccccccccccccccccccccccccccccaaaggcucuuuucagagccaccagaauu

SEQ ID NO: 301 - RNA, 1039 nt, Artificial Sequence
  IL12A(1-219) mRNA product TOP UTR opt2
ggggcgcugccuacggagguggcagccaucuccuucucggcaucaagcuuaccaugugccccgcccgcucccuccuccucgucgccacccucguccuccucgaccaccucucccucgcccgcaaccuccccgucgccacccccgaccccggcauguuccccugccuccaccacucccagaaccuccuccgcgccgucuccaacaugcuccagaaggcccgccagacccucgaguucuaccccugcaccuccgaggagaucgaccacgaggacaucaccaaggacaagaccuccaccgucgaggccugccucccccucgagcucaccaagaacgaguccugccucaacucccgcgagaccuccuucaucaccaacggcuccugccucgccucccgcaagaccuccuucaugauggcccucugccucuccuccaucuacgaggaccucaagauguaccaggucgaguucaagaccaugaacgccaagcuccucauggaccccaagcgccagaucuuccucgaccagaacaugcucgccgucaucgacgagcucaugcaggcccucaacuucaacuccgagaccgucccccagaaguccucccucgaggagcccgacuucuacaagaccaagaucaagcucugcauccuccuccacgccuuccgcauccgcgccgucaccaucgaccgcgucauguccuaccucaacgccuccggacuagugcaucacauuuaaaagcaucucagccuaccaugagaauaagagaaagaaaaugaagaucaauagcuuauucaucucuuuuucuuuuucguugguguaaagccaacacccugucuaaaaaacauaaauuucuuuaaucauuuugccucuuuucucugugcuucaauuaauaaaaaauggaaagaaccuagaucuaaaaaaaaaaaaaaaaaaaaaaaaaaaaaaaaaaaaaaaaaaaaaaaaaaaaaaaaaaaaaaaaugcaucccccccccccccccccccccccccccccccaaaggcucuuuucagagccaccagaauu

SEQ ID NO: 302 - RNA, 976 nt, Artificial Sequence
  IL12A(23-219) mRNA product TOP UTR opt2
ggggcgcugccuacggagguggcagccaucuccuucucggcaucaagcuuacccgcaaccuccccgucgccacccccgaccccggcauguuccccugccuccaccacucccagaaccuccuccgcgccgucuccaacaugcuccagaaggcccgccagacccucgaguucuaccccugcaccuccgaggagaucgaccacgaggacaucaccaaggacaagaccuccaccgucgaggccugccucccccucgagcucaccaagaacgaguccugccucaacucccgcgagaccuccuucaucaccaacggcuccugccucgccucccgcaagaccuccuucaugauggcccucugccucuccuccaucuacgaggaccucaagauguaccaggucgaguucaagaccaugaacgccaagcuccucauggaccccaagcgccagaucuuccucgaccagaacaugcucgccgucaucgacgagcucaugcaggcccucaacuucaacuccgagaccgucccccagaaguccucccucgaggagcccgacuucuacaagaccaagaucaagcucugcauccuccuccacgccuuccgcauccgcgccgucaccaucgaccgcgucauguccuaccucaacgccuccugaggacuagugcaucacauuuaaaagcaucucagccuaccaugagaauaagagaaagaaaaugaagaucaauagcuuauucaucucuuuuucuuuuucguugguguaaagccaacacccugucuaaaaaacauaaauuucuuuaaucauuuugccucuuuucucugugcuucaauuaauaaaaaauggaaagaaccuagaucuaaaaaaaaaaaaaaaaaaaaaaaaaaaaaaaaaaaaaaaaaaaaaaaaaaaaaaaaaaaaaaaaugcaucccccccccccccccccccccccccccccccaaaggcucuuuucagagccaccagaauu

SEQ ID NO: 303 - RNA, 1369 nt, Artificial Sequence
  IL12B mRNA product TOP UTR opt2
ggggcgcugccuacggagguggcagccaucuccuucucggcaucaagcuuaccaugugccaccagcagcucgucaucuccugguucucccucgucuuccucgccuccccccucgucgccaucugggagcucaagaaggacgucuacgucgucgagcucgacugguaccccgacgcccccggcgagauggucguccucaccugugacacccccgaggaggacggcaucaccuggacccucgaccaguccuccgagguccucggcuccggcaagacccucaccauccaggucaaggaguucggcgacgccggccaguacaccugucacaagggcggcgagguccucucccacucccuccuccuccuccacaagaaggaggacggcaucugguccaccgacauccucaaggaccagaaggagcccaagaacaagaccuuccuccgcugcgaggccaagaacuacuccggccgcuucaccuguugguggcucaccaccaucuccaccgaccucaccuucuccgucaaguccucccgcggcuccuccgacccccagggcgucaccuguggcgccgccacccucuccgccgagcgcguccgcggcgacaacaaggaguacgaguacuccgucgagugccaggaggacuccgccugccccgccgccgaggagucccuccccaucgaggucauggucgacgccguccacaagcucaaguacgagaacuacaccuccuccuucuucauccgcgacaucaucaagcccgacccccccaagaaccuccagcucaagccccucaagaacucccgccaggucgaggucuccugggaguaccccgacaccugguccaccccccacuccuacuucucccucaccuucugcguccagguccagggcaaguccaagcgcgagaagaaggaccgcgucuucaccgacaagaccuccgccaccgucaucugccgcaagaacgccuccaucuccguccgcgcccaggaccgcuacuacuccuccuccugguccgagugggccuccguccccugcuccugaggacuagugcaucacauuuaaaagcaucucagccuaccaugagaauaagagaaagaaaaugaagaucaauagcuuauucaucucuuuuucuuuuucguugguguaaagccaacacccugucuaaaaaacauaaauuucuuuaaucauuuugccucuuuucucugugcuucaauuaauaaaaaauggaaagaaccuagaucuaaaaaaaaaaaaaaaaaaaaaaaaaaaaaaaaaaaaaaaaaaaaaaaaaaaaaaaaaaaaaaaaugcaucccccccccccccccccccccccccccccccaaaggcucuuuucagagccaccagaauu

SEQ ID NO: 304 - RNA, 1366 nt, Artificial Sequence
  IL12B(1-328) mRNA product TOP UTR opt2
ggggcgcugccuacggagguggcagccaucuccuucucggcaucaagcuuaccaugugccaccagcagcucgucaucuccugguucucccucgucuuccucgccuccccccucgucgccaucugggagcucaagaaggacgucuacgucgucgagcucgacugguaccccgacgcccccggcgagauggucguccucaccugugacacccccgaggaggacggcaucaccuggacccucgaccaguccuccgagguccucggcuccggcaagacccucaccauccaggucaaggaguucggcgacgccggccaguacaccugucacaagggcggcgagguccucucccacucccuccuccuccuccacaagaaggaggacggcaucugguccaccgacauccucaaggaccagaaggagcccaagaacaagaccuuccuccgcugcgaggccaagaacuacuccggccgcuucaccuguugguggcucaccaccaucuccaccgaccucaccuucuccgucaaguccucccgcggcuccuccgacccccagggcgucaccuguggcgccgccacccucuccgccgagcgcguccgcggcgacaacaaggaguacgaguacuccgucgagugccaggaggacuccgccugccccgccgccgaggagucccuccccaucgaggucauggucgacgccguccacaagcucaaguacgagaacuacaccuccuccuucuucauccgcgacaucaucaagcccgacccccccaagaaccuccagcucaagccccucaagaacucccgccaggucgaggucuccugggaguaccccgacaccugguccaccccccacuccuacuucucccucaccuucugcguccagguccagggcaaguccaagcgcgagaagaaggaccgcgucuucaccgacaagaccuccgccaccgucaucugccgcaagaacgccuccaucuccguccgcgcccaggaccgcuacuacuccuccuccugguccgagugggccuccguccccugcuccggacuagugcaucacauuuaaaagcaucucagccuaccaugagaauaagagaaagaaaaugaagaucaauagcuuauucaucucuuuuucuuuuucguugguguaaagccaacacccugucuaaaaaacauaaauuucuuuaaucauuuugccucuuuucucugugcuucaauuaauaaaaaauggaaagaaccuagaucuaaaaaaaaaaaaaaaaaaaaaaaaaaaaaaaaaaaaaaaaaaaaaaaaaaaaaaaaaaaaaaaaugcaucccccccccccccccccccccccccccccccaaaggcucuuuucagagccaccagaauu

SEQ ID NO: 305 - RNA, 1303 nt, Artificial Sequence
  IL12B(23-328) mRNA product TOP UTR opt2
ggggcgcugccuacggagguggcagccaucuccuucucggcaucaagcuuaccaucugggagcucaagaaggacgucuacgucgucgagcucgacugguaccccgacgcccccggcgagauggucguccucaccugugacacccccgaggaggacggcaucaccuggacccucgaccaguccuccgagguccucggcuccggcaagacccucaccauccaggucaaggaguucggcgacgccggccaguacaccugucacaagggcggcgagguccucucccacucccuccuccuccuccacaagaaggaggacggcaucugguccaccgacauccucaaggaccagaaggagcccaagaacaagaccuuccuccgcugcgaggccaagaacuacuccggccgcuucaccuguugguggcucaccaccaucuccaccgaccucaccuucuccgucaaguccucccgcggcuccuccgacccccagggcgucaccuguggcgccgccacccucuccgccgagcgcguccgcggcgacaacaaggaguacgaguacuccgucgagugccaggaggacuccgccugccccgccgccgaggagucccuccccaucgaggucauggucgacgccguccacaagcucaaguacgagaacuacaccuccuccuucuucauccgcgacaucaucaagcccgacccccccaagaaccuccagcucaagccccucaagaacucccgccaggucgaggucuccugggaguaccccgacaccugguccaccccccacuccuacuucucccucaccuucugcguccagguccagggcaaguccaagcgcgagaagaaggaccgcgucuucaccgacaagaccuccgccaccgucaucugccgcaagaacgccuccaucuccguccgcgcccaggaccgcuacuacuccuccuccugguccgagugggccuccguccccugcuccugaggacuagugcaucacauuuaaaagcaucucagccuaccaugagaauaagagaaagaaaaugaagaucaauagcuuauucaucucuuuuucuuuuucguugguguaaagccaacacccugucuaaaaaacauaaauuucuuuaaucauuuugccucuuuucucugugcuucaauuaauaaaaaauggaaagaaccuagaucuaaaaaaaaaaaaaaaaaaaaaaaaaaaaaaaaaaaaaaaaaaaaaaaaaaaaaaaaaaaaaaaaugcaucccccccccccccccccccccccccccccccaaaggcucuuuucagagccaccagaauu

SEQ ID NO: 306 - RNA, 436 nt, Artificial Sequence
  Linker-sFvCC49-218 mRNA product TOP UTR opt2
ggggcgcugccuacggagguggcagccaucuccuucucggcaucaagcuuaccggcuccaccuccggcuccggcaagcccggcuccggcgagggcuccaccaagggcggacuagugcaucacauuuaaaagcaucucagccuaccaugagaauaagagaaagaaaaugaagaucaauagcuuauucaucucuuuuucuuuuucguugguguaaagccaacacccugucuaaaaaacauaaauuucuuuaaucauuuugccucuuuucucugugcuucaauuaauaaaaaauggaaagaaccuagaucuaaaaaaaaaaaaaaaaaaaaaaaaaaaaaaaaaaaaaaaaaaaaaaaaaaaaaaaaaaaaaaaaugcaucccccccccccccccccccccccccccccccaaaggcucuuuucagagccaccagaauu

SEQ ID NO: 307 - RNA, 2014 nt, Artificial Sequence
  IL12 mRNA product TOP UTR opt2
ggggcgcugccuacggagguggcagccaucuccuucucggcaucaagcuuaccaugugccaccagcagcucgucaucuccugguucucccucgucuuccucgccuccccccucgucgccaucugggagcucaagaaggacgucuacgucgucgagcucgacugguaccccgacgcccccggcgagauggucguccucaccugugacacccccgaggaggacggcaucaccuggacccucgaccaguccuccgagguccucggcuccggcaagacccucaccauccaggucaaggaguucggcgacgccggccaguacaccugucacaagggcggcgagguccucucccacucccuccuccuccuccacaagaaggaggacggcaucugguccaccgacauccucaaggaccagaaggagcccaagaacaagaccuuccuccgcugcgaggccaagaacuacuccggccgcuucaccuguugguggcucaccaccaucuccaccgaccucaccuucuccgucaaguccucccgcggcuccuccgacccccagggcgucaccuguggcgccgccacccucuccgccgagcgcguccgcggcgacaacaaggaguacgaguacuccgucgagugccaggaggacuccgccugccccgccgccgaggagucccuccccaucgaggucauggucgacgccguccacaagcucaaguacgagaacuacaccuccuccuucuucauccgcgacaucaucaagcccgacccccccaagaaccuccagcucaagccccucaagaacucccgccaggucgaggucuccugggaguaccccgacaccugguccaccccccacuccuacuucucccucaccuucugcguccagguccagggcaaguccaagcgcgagaagaaggaccgcgucuucaccgacaagaccuccgccaccgucaucugccgcaagaacgccuccaucuccguccgcgcccaggaccgcuacuacuccuccuccugguccgagugggccuccguccccugcuccggcuccaccuccggcuccggcaagcccggcuccggcgagggcuccaccaagggccgcaaccuccccgucgccacccccgaccccggcauguuccccugccuccaccacucccagaaccuccuccgcgccgucuccaacaugcuccagaaggcccgccagacccucgaguucuaccccugcaccuccgaggagaucgaccacgaggacaucaccaaggacaagaccuccaccgucgaggccugccucccccucgagcucaccaagaacgaguccugccucaacucccgcgagaccuccuucaucaccaacggcuccugccucgccucccgcaagaccuccuucaugauggcccucugccucuccuccaucuacgaggaccucaagauguaccaggucgaguucaagaccaugaacgccaagcuccucauggaccccaagcgccagaucuuccucgaccagaacaugcucgccgucaucgacgagcucaugcaggcccucaacuucaacuccgagaccgucccccagaaguccucccucgaggagcccgacuucuacaagaccaagaucaagcucugcauccuccuccacgccuuccgcauccgcgccgucaccaucgaccgcgucauguccuaccucaacgccuccugaggacuagugcaucacauuuaaaagcaucucagccuaccaugagaauaagagaaagaaaaugaagaucaauagcuuauucaucucuuuuucuuuuucguugguguaaagccaacacccugucuaaaaaacauaaauuucuuuaaucauuuugccucuuuucucugugcuucaauuaauaaaaaauggaaagaaccuagaucuaaaaaaaaaaaaaaaaaaaaaaaaaaaaaaaaaaaaaaaaaaaaaaaaaaaaaaaaaaaaaaaaugcaucccccccccccccccccccccccccccccccaaaggcucuuuucagagccaccagaauu

SEQ ID NO: 308 - RNA, 1168 nt, Artificial Sequence
  CD40LG mRNA product TOP UTR opt2
ggggcgcugccuacggagguggcagccaucuccuucucggcaucaagcuuaccaugaucgagaccuacaaccagaccuccccccgcuccgccgccaccggccuccccaucuccaugaagaucuucauguaccuccucaccgucuuccucaucacccagaugaucggcuccgcccucuucgccgucuaccuccaccgccgccucgacaagaucgaggacgagcgcaaccuccacgaggacuucgucuucaugaagaccauccagcgcugcaacaccggcgagcgcucccucucccuccucaacugcgaggagaucaagucccaguucgagggcuucgucaaggacaucaugcucaacaaggaggagaccaagaaggagaacuccuucgagaugcagaagggcgaccagaacccccagaucgccgcccacgucaucuccgaggccuccuccaagaccaccuccguccuccagugggccgagaagggcuacuacaccauguccaacaaccucgucacccucgagaacggcaagcagcucaccgucaagcgccagggccucuacuacaucuacgcccaggucaccuucugcuccaaccgcgaggccuccucccaggcccccuucaucgccucccucugccucaagucccccggccgcuucgagcgcauccuccuccgcgccgccaacacccacuccuccgccaagcccugcggccagcaguccauccaccucggcggcgucuucgagcuccagcccggcgccuccgucuucgucaacgucaccgaccccucccaggucucccacggcaccggcuucaccuccuucggccuccucaagcucugaggacuagugcaucacauuuaaaagcaucucagccuaccaugagaauaagagaaagaaaaugaagaucaauagcuuauucaucucuuuuucuuuuucguugguguaaagccaacacccugucuaaaaaacauaaauuucuuuaaucauuuugccucuuuucucugugcuucaauuaauaaaaaauggaaagaaccuagaucuaaaaaaaaaaaaaaaaaaaaaaaaaaaaaaaaaaaaaaaaaaaaaaaaaaaaaaaaaaaaaaaaugcaucccccccccccccccccccccccccccccccaaaggcucuuuucagagccaccagaauu

SEQ ID NO: 309 - RNA, 1249 nt, Artificial Sequence
  PDCD1 mRNA product TOP UTR opt3
ggggcgcugccuacggagguggcagccaucuccuucucggcaucaagcuuaccaugcagaucccccaagccccuuggccaguggucugggcuguucugcagcucggcuggagaccggggugguuccuugacagccccgauaggccuuggaacccacccaccuuuuccccugcacuguuggugguaacagagggagacaaugccacuuucacgugcucuuuuucaaacaccagugagagcuucguguuaaauugguaccggauguccccaucuaaccagacagauaagcuggcggcuuuucccgaagaccgcucgcagccuggucaagauugucgauuccgugucacucagcuaccaaauggcagagacuuucacaugucagugguuagggcccggcgcaacgauagcgggaccuaucucugcggagcaauuagucuggccccgaaagcucagauaaaggaaucccuuagagcagagcugagggugacagaacggcgcgccgagguccccaccgcucauccuucuccaagcccccgaccugccggccaguuccaaacuuuggugguagguguugucgggggacuccugggcucccuggugcucuuagugugggugcuggcggucaucuguucaagagcagccaggggcacaauuggggcucggcguaccggacagccacuuaaagaggaccccagugccguuccgguguuuagcguagauuacggugaauuggacuuccaguggcgcgagaagacgccugaacccccagugccuugcguccccgagcagacugaguaugcaaccaucguguuuccaucuggcauggggacauccucacccgcuagaaggggaagcgccgauggcccucggagugcgcaaccacugcgaccggaagacggucacuguucuuggccccuaugaggacuagugcaucacauuuaaaagcaucucagccuaccaugagaauaagagaaagaaaaugaagaucaauagcuuauucaucucuuuuucuuuuucguugguguaaagccaacacccugucuaaaaaacauaaauuucuuuaaucauuuugccucuuuucucugugcuucaauuaauaaaaaauggaaagaaccuagaucuaaaaaaaaaaaaaaaaaaaaaaaaaaaaaaaaaaaaaaaaaaaaaaaaaaaaaaaaaaaaaaaaugcaucccccccccccccccccccccccccccccccaaaggcucuuuucagagccaccagaauu

SEQ ID NO: 310 - RNA, 832 nt, Artificial Sequence
  PDCD1(1-149) mRNA product TOP UTR opt3
ggggcgcugccuacggagguggcagccaucuccuucucggcaucaagcuuaccaugcagaucccccaagccccuuggccaguggucugggcuguucugcagcucggcuggagaccggggugguuccuugacagccccgauaggccuuggaacccacccaccuuuuccccugcacuguuggugguaacagagggagacaaugccacuuucacgugcucuuuuucaaacaccagugagagcuucguguuaaauugguaccggauguccccaucuaaccagacagauaagcuggcggcuuuucccgaagaccgcucgcagccuggucaagauugucgauuccgugucacucagcuaccaaauggcagagacuuucacaugucagugguuagggcccggcgcaacgauagcgggaccuaucucugcggagcaauuagucuggccccgaaagcucagauaaaggaaucccuuagagcagagcugagggugacagaacggcgcgccugaggacuagugcaucacauuuaaaagcaucucagccuaccaugagaauaagagaaagaaaaugaagaucaauagcuuauucaucucuuuuucuuuuucguugguguaaagccaacacccugucuaaaaaacauaaauuucuuuaaucauuuugccucuuuucucugugcuucaauuaauaaaaaauggaaagaaccuagaucuaaaaaaaaaaaaaaaaaaaaaaaaaaaaaaaaaaaaaaaaaaaaaaaaaaaaaaaaaaaaaaaaugcaucccccccccccccccccccccccccccccccaaaggcucuuuucagagccaccagaauu

SEQ ID NO: 311 - RNA, 1042 nt, Artificial Sequence
  IL12A mRNA product TOP UTR opt3
ggggcgcugccuacggagguggcagccaucuccuucucggcaucaagcuuaccaugugccccgccagaagccugcuccuuguggcuacccuggucuuguuagaccaccugucccuagcaaggaaccucccuguugccacaccagauccgggcauguuccccugucugcaucacucucagaaucuucugcgggcggugucaaacauguugcaaaaggcucgccagacucucgaguuuuacccuugcacgagugaagagaucgaccaugaagauauuaccaaagacaagacaagcacuguagaggccugucugccacuggaacucaccaaaaaugaguccugcuuaaacucucgagagacaucguucauaaccaaugggucaugucuggcaagccguaagacaaguuuuaugauggcccuuugcuuguccucuaucuaugaagaucugaaaauguaccagguggaguucaagacuaugaacgcuaagcuacucauggaccccaaaagacagauuuuucuggaucaaaauaugcuugcagucaucgacgaacugaugcaggccuugaacuucaauagcgagaccgugccucagaaguccucacucgaggaaccagauuuuuauaaaacgaagauuaaacuguguaucuuacugcacgcuuucaggauacgggccguuacuaucgaccgcgugaugaguuaccucaacgcgagcugaggacuagugcaucacauuuaaaagcaucucagccuaccaugagaauaagagaaagaaaaugaagaucaauagcuuauucaucucuuuuucuuuuucguugguguaaagccaacacccugucuaaaaaacauaaauuucuuuaaucauuuugccucuuuucucugugcuucaauuaauaaaaaauggaaagaaccuagaucuaaaaaaaaaaaaaaaaaaaaaaaaaaaaaaaaaaaaaaaaaaaaaaaaaaaaaaaaaaaaaaaaugcaucccccccccccccccccccccccccccccccaaaggcucuuuucagagccaccagaauu

SEQ ID NO: 312 - RNA, 1039 nt, Artificial Sequence
  IL12A(1-219) mRNA product TOP UTR opt3
ggggcgcugccuacggagguggcagccaucuccuucucggcaucaagcuuaccaugugccccgccagaagccugcuccuuguggcuacccuggucuuguuagaccaccugucccuagcaaggaaccucccuguugccacaccagauccgggcauguuccccugucugcaucacucucagaaucuucugcgggcggugucaaacauguugcaaaaggcucgccagacucucgaguuuuacccuugcacgagugaagagaucgaccaugaagauauuaccaaagacaagacaagcacuguagaggccugucugccacuggaacucaccaaaaaugaguccugcuuaaacucucgagagacaucguucauaaccaaugggucaugucuggcaagccguaagacaaguuuuaugauggcccuuugcuuguccucuaucuaugaagaucugaaaauguaccagguggaguucaagacuaugaacgcuaagcuacucauggaccccaaaagacagauuuuucuggaucaaaauaugcuugcagucaucgacgaacugaugcaggccuugaacuucaauagcgagaccgugccucagaaguccucacucgaggaaccagauuuuuauaaaacgaagauuaaacuguguaucuuacugcacgcuuucaggauacgggccguuacuaucgaccgcgugaugaguuaccucaacgcgagcggacuagugcaucacauuuaaaagcaucucagccuaccaugagaauaagagaaagaaaaugaagaucaauagcuuauucaucucuuuuucuuuuucguugguguaaagccaacacccugucuaaaaaacauaaauuucuuuaaucauuuugccucuuuucucugugcuucaauuaauaaaaaauggaaagaaccuagaucuaaaaaaaaaaaaaaaaaaaaaaaaaaaaaaaaaaaaaaaaaaaaaaaaaaaaaaaaaaaaaaaaugcaucccccccccccccccccccccccccccccccaaaggcucuuuucagagccaccagaauu

SEQ ID NO: 313 - RNA, 976 nt, Artificial Sequence
  IL12A(23-219) mRNA product TOP UTR opt3
ggggcgcugccuacggagguggcagccaucuccuucucggcaucaagcuuaccaggaaccucccuguugccacaccagauccgggcauguuccccugucugcaucacucucagaaucuucugcgggcggugucaaacauguugcaaaaggcucgccagacucucgaguuuuacccuugcacgagugaagagaucgaccaugaagauauuaccaaagacaagacaagcacuguagaggccugucugccacuggaacucaccaaaaaugaguccugcuuaaacucucgagagacaucguucauaaccaaugggucaugucuggcaagccguaagacaaguuuuaugauggcccuuugcuuguccucuaucuaugaagaucugaaaauguaccagguggaguucaagacuaugaacgcuaagcuacucauggaccccaaaagacagauuuuucuggaucaaaauaugcuugcagucaucgacgaacugaugcaggccuugaacuucaauagcgagaccgugccucagaaguccucacucgaggaaccagauuuuuauaaaacgaagauuaaacuguguaucuuacugcacgcuuucaggauacgggccguuacuaucgaccgcgugaugaguuaccucaacgcgagcugaggacuagugcaucacauuuaaaagcaucucagccuaccaugagaauaagagaaagaaaaugaagaucaauagcuuauucaucucuuuuucuuuuucguugguguaaagccaacacccugucuaaaaaacauaaauuucuuuaaucauuuugccucuuuucucugugcuucaauuaauaaaaaauggaaagaaccuagaucuaaaaaaaaaaaaaaaaaaaaaaaaaaaaaaaaaaaaaaaaaaaaaaaaaaaaaaaaaaaaaaaaugcaucccccccccccccccccccccccccccccccaaaggcucuuuucagagccaccagaauu

SEQ ID NO: 314 - RNA, 1369 nt, Artificial Sequence
  IL12B mRNA product TOP UTR opt3
ggggcgcugccuacggagguggcagccaucuccuucucggcaucaagcuuaccaugugccaccagcaacuggugaucagcugguucucccucgucuuucuugccucuccccugguugcuauuugggaguugaagaaagacguguacguaguggaauuagauugguauccugacgcaccaggcgagauggucgugcugaccugugauacaccggaagaggacgggauaacuuggacgcuagaucagucaagugaaguucucggaagcgguaagacccugacaauccaggugaaagaguucggcgacgccgggcaguacacuugccauaagggaggcgagguccuuucccacucucuguugcuccugcauaaaaaggaagaugguauuuggucgaccgacauccugaaggaucaaaaagagcccaagaacaaaacauuucucagaugugaagcgaagaauuauucagggagguuuaccugcuggugguuaacuacaauuagcaccgaccugacguucagugugaaauccucucggggaagcuccgauccucagggcguaacuuguggcgcugccacccuuucagcagagcgcguucgaggggacaacaaggaguacgaauauaguguggagugccaggaagauagcgccuguccagcugcagaggaaucuuugcccaucgaggucaugguggacgccgugcacaagcugaaauacgagaauuauacauccucauucuuuauacgugacaucauuaagccugauccacccaaaaaccuacagcucaagccucugaaaaauagcagacaagucgaaguuaguugggaguacccagacacuuggucuaccccgcauuccuacuucagccuuacauuuugcgugcagguacagggaaagucgaaaagggaaaagaaggaucggguguucaccgacaaaacgucugcuacugucaucugucgcaagaacgccuccauuucagugagagcgcaggauagguauuacaguagcuccuggucugagugggcaagcguucccugcucaugaggacuagugcaucacauuuaaaagcaucucagccuaccaugagaauaagagaaagaaaaugaagaucaauagcuuauucaucucuuuuucuuuuucguugguguaaagccaacacccugucuaaaaaacauaaauuucuuuaaucauuuugccucuuuucucugugcuucaauuaauaaaaaauggaaagaaccuagaucuaaaaaaaaaaaaaaaaaaaaaaaaaaaaaaaaaaaaaaaaaaaaaaaaaaaaaaaaaaaaaaaaugcaucccccccccccccccccccccccccccccccaaaggcucuuuucagagccaccagaauu

SEQ ID NO: 315 - RNA, 1366 nt, Artificial Sequence
  IL12B(1-328) mRNA product TOP UTR opt3
ggggcgcugccuacggagguggcagccaucuccuucucggcaucaagcuuaccaugugccaccagcaacuggugaucagcugguucucccucgucuuucuugccucuccccugguugcuauuugggaguugaagaaagacguguacguaguggaauuagauugguauccugacgcaccaggcgagauggucgugcugaccugugauacaccggaagaggacgggauaacuuggacgcuagaucagucaagugaaguucucggaagcgguaagacccugacaauccaggugaaagaguucggcgacgccgggcaguacacuugccauaagggaggcgagguccuuucccacucucuguugcuccugcauaaaaaggaagaugguauuuggucgaccgacauccugaaggaucaaaaagagcccaagaacaaaacauuucucagaugugaagcgaagaauuauucagggagguuuaccugcuggugguuaacuacaauuagcaccgaccugacguucagugugaaauccucucggggaagcuccgauccucagggcguaacuuguggcgcugccacccuuucagcagagcgcguucgaggggacaacaaggaguacgaauauaguguggagugccaggaagauagcgccuguccagcugcagaggaaucuuugcccaucgaggucaugguggacgccgugcacaagcugaaauacgagaauuauacauccucauucuuuauacgugacaucauuaagccugauccacccaaaaaccuacagcucaagccucugaaaaauagcagacaagucgaaguuaguugggaguacccagacacuuggucuaccccgcauuccuacuucagccuuacauuuugcgugcagguacagggaaagucgaaaagggaaaagaaggaucggguguucaccgacaaaacgucugcuacugucaucugucgcaagaacgccuccauuucagugagagcgcaggauagguauuacaguagcuccuggucugagugggcaagcguucccugcucaggacuagugcaucacauuuaaaagcaucucagccuaccaugagaauaagagaaagaaaaugaagaucaauagcuuauucaucucuuuuucuuuuucguugguguaaagccaacacccugucuaaaaaacauaaauuucuuuaaucauuuugccucuuuucucugugcuucaauuaauaaaaaauggaaagaaccuagaucuaaaaaaaaaaaaaaaaaaaaaaaaaaaaaaaaaaaaaaaaaaaaaaaaaaaaaaaaaaaaaaaaugcaucccccccccccccccccccccccccccccccaaaggcucuuuucagagccaccagaauu

SEQ ID NO: 316 - RNA, 1303 nt, Artificial Sequence
  IL12B(23-328) mRNA product TOP UTR opt3
ggggcgcugccuacggagguggcagccaucuccuucucggcaucaagcuuaccauuugggaguugaagaaagacguguacguaguggaauuagauugguauccugacgcaccaggcgagauggucgugcugaccugugauacaccggaagaggacgggauaacuuggacgcuagaucagucaagugaaguucucggaagcgguaagacccugacaauccaggugaaagaguucggcgacgccgggcaguacacuugccauaagggaggcgagguccuuucccacucucuguugcuccugcauaaaaaggaagaugguauuuggucgaccgacauccugaaggaucaaaaagagcccaagaacaaaacauuucucagaugugaagcgaagaauuauucagggagguuuaccugcuggugguuaacuacaauuagcaccgaccugacguucagugugaaauccucucggggaagcuccgauccucagggcguaacuuguggcgcugccacccuuucagcagagcgcguucgaggggacaacaaggaguacgaauauaguguggagugccaggaagauagcgccuguccagcugcagaggaaucuuugcccaucgaggucaugguggacgccgugcacaagcugaaauacgagaauuauacauccucauucuuuauacgugacaucauuaagccugauccacccaaaaaccuacagcucaagccucugaaaaauagcagacaagucgaaguuaguugggaguacccagacacuuggucuaccccgcauuccuacuucagccuuacauuuugcgugcagguacagggaaagucgaaaagggaaaagaaggaucggguguucaccgacaaaacgucugcuacugucaucugucgcaagaacgccuccauuucagugagagcgcaggauagguauuacaguagcuccuggucugagugggcaagcguucccugcucaugaggacuagugcaucacauuuaaaagcaucucagccuaccaugagaauaagagaaagaaaaugaagaucaauagcuuauucaucucuuuuucuuuuucguugguguaaagccaacacccugucuaaaaaacauaaauuucuuuaaucauuuugccucuuuucucugugcuucaauuaauaaaaaauggaaagaaccuagaucuaaaaaaaaaaaaaaaaaaaaaaaaaaaaaaaaaaaaaaaaaaaaaaaaaaaaaaaaaaaaaaaaugcaucccccccccccccccccccccccccccccccaaaggcucuuuucagagccaccagaauu

SEQ ID NO: 317 - RNA, 436 nt, Artificial Sequence
  Linker-sFvCC49-218 mRNA product TOP UTR opt3
ggggcgcugccuacggagguggcagccaucuccuucucggcaucaagcuuaccggcagcaccuccgggucuggaaagcccgguucaggcgaggggaguacaaaaggaggacuagugcaucacauuuaaaagcaucucagccuaccaugagaauaagagaaagaaaaugaagaucaauagcuuauucaucucuuuuucuuuuucguugguguaaagccaacacccugucuaaaaaacauaaauuucuuuaaucauuuugccucuuuucucugugcuucaauuaauaaaaaauggaaagaaccuagaucuaaaaaaaaaaaaaaaaaaaaaaaaaaaaaaaaaaaaaaaaaaaaaaaaaaaaaaaaaaaaaaaaugcaucccccccccccccccccccccccccccccccaaaggcucuuuucagagccaccagaauu

SEQ ID NO: 318 - RNA, 2014 nt, Artificial Sequence
  IL12 mRNA product TOP UTR opt3
ggggcgcugccuacggagguggcagccaucuccuucucggcaucaagcuuaccaugugccaccagcaacuggugaucagcugguucucccucgucuuucuugccucuccccugguugcuauuugggaguugaagaaagacguguacguaguggaauuagauugguauccugacgcaccaggcgagauggucgugcugaccugugauacaccggaagaggacgggauaacuuggacgcuagaucagucaagugaaguucucggaagcgguaagacccugacaauccaggugaaagaguucggcgacgccgggcaguacacuugccauaagggaggcgagguccuuucccacucucuguugcuccugcauaaaaaggaagaugguauuuggucgaccgacauccugaaggaucaaaaagagcccaagaacaaaacauuucucagaugugaagcgaagaauuauucagggagguuuaccugcuggugguuaacuacaauuagcaccgaccugacguucagugugaaauccucucggggaagcuccgauccucagggcguaacuuguggcgcugccacccuuucagcagagcgcguucgaggggacaacaaggaguacgaauauaguguggagugccaggaagauagcgccuguccagcugcagaggaaucuuugcccaucgaggucaugguggacgccgugcacaagcugaaauacgagaauuauacauccucauucuuuauacgugacaucauuaagccugauccacccaaaaaccuacagcucaagccucugaaaaauagcagacaagucgaaguuaguugggaguacccagacacuuggucuaccccgcauuccuacuucagccuuacauuuugcgugcagguacagggaaagucgaaaagggaaaagaaggaucggguguucaccgacaaaacgucugcuacugucaucugucgcaagaacgccuccauuucagugagagcgcaggauagguauuacaguagcuccuggucugagugggcaagcguucccugcucaggcagcaccuccgggucuggaaagcccgguucaggcgaggggaguacaaaaggaaggaaccucccuguugccacaccagauccgggcauguuccccugucugcaucacucucagaaucuucugcgggcggugucaaacauguugcaaaaggcucgccagacucucgaguuuuacccuugcacgagugaagagaucgaccaugaagauauuaccaaagacaagacaagcacuguagaggccugucugccacuggaacucaccaaaaaugaguccugcuuaaacucucgagagacaucguucauaaccaaugggucaugucuggcaagccguaagacaaguuuuaugauggcccuuugcuuguccucuaucuaugaagaucugaaaauguaccagguggaguucaagacuaugaacgcuaagcuacucauggaccccaaaagacagauuuuucuggaucaaaauaugcuugcagucaucgacgaacugaugcaggccuugaacuucaauagcgagaccgugccucagaaguccucacucgaggaaccagauuuuuauaaaacgaagauuaaacuguguaucuuacugcacgcuuucaggauacgggccguuacuaucgaccgcgugaugaguuaccucaacgcgagcugaggacuagugcaucacauuuaaaagcaucucagccuaccaugagaauaagagaaagaaaaugaagaucaauagcuuauucaucucuuuuucuuuuucguugguguaaagccaacacccugucuaaaaaacauaaauuucuuuaaucauuuugccucuuuucucugugcuucaauuaauaaaaaauggaaagaaccuagaucuaaaaaaaaaaaaaaaaaaaaaaaaaaaaaaaaaaaaaaaaaaaaaaaaaaaaaaaaaaaaaaaaugcaucccccccccccccccccccccccccccccccaaaggcucuuuucagagccaccagaauu

SEQ ID NO: 319 - RNA, 1168 nt, Artificial Sequence
  CD40LG mRNA product TOP UTR opt3
ggggcgcugccuacggagguggcagccaucuccuucucggcaucaagcuuaccaugaucgagaccuacaaccagacaagccccagauccgccgcuacuggccugccuauuucuaugaagauauucauguaucuccuuacgguguuucugaucacccaaaugauugggucagcauuguucgccgucuacuuacacaggcggcuggacaaaaucgaagaugagcgcaaucuacaugaagacuuuguuuucaugaagacaauucagcgaugcaacacuggagagcguagucucagccugcuuaauugugaagagaucaaaucccaguuugaggguuucgugaaggauauaaugcugaacaaagaagagaccaagaaggaaaauucuuuugagaugcagaaaggcgaccaaaacccacagaucgcggcucacguaauuucggaggccucaagcaagacaaccaguguguugcagugggcagaaaaaggguauuacacuauguccaauaaccucgucacacuggagaauggaaagcagcugaccgugaaaagacaaggccucuauuacaucuaugcccagguuacguucugcucuaacagggaagcuagcucccaggcaccguuuauugccucauuaugucugaagagucccggucgguucgagcgcauccuuuugagagcugccaauacucauagcucugcgaagccuugcgggcagcaauccauacaccugggaggcguguuugaacuacagccaggcgcaucagucuucgugaacguaaccgaucccagccagguuagucaugggacaggauuuacuucuuucggucuccugaaacuuugaggacuagugcaucacauuuaaaagcaucucagccuaccaugagaauaagagaaagaaaaugaagaucaauagcuuauucaucucuuuuucuuuuucguugguguaaagccaacacccugucuaaaaaacauaaauuucuuuaaucauuuugccucuuuucucugugcuucaauuaauaaaaaauggaaagaaccuagaucuaaaaaaaaaaaaaaaaaaaaaaaaaaaaaaaaaaaaaaaaaaaaaaaaaaaaaaaaaaaaaaaaugcaucccccccccccccccccccccccccccccccaaaggcucuuuucagagccaccagaauu

SEQ ID NO: 320 - RNA, 1249 nt, Artificial Sequence
  PDCD1 mRNA product TOP UTR opt3v
ggggcgcugccuacggagguggcagccaucuccuucucggcaucaagcuuaccaugcagaucccucaggcuccuuggccuguugugugggcuguucugcaacuuggauggcggccuggcugguuccuggacucuccugacagacccuggaauccuccaacauucagccccgcucugcuggugguuaccgagggcgauaaugccaccuucaccuguagcuucagcaacaccagcgagagcuucgugcugaacugguacagaaugagccccagcaaccagaccgacaagcuggccgccuuuccugaggauagaucucagcccggccaggacugccgguucagaguuacacagcugcccaacggccgggacuuccacaugucugucguccgggccagaagaaacgacagcggcacauaucugugcggcgccauuucucuggccccuaaggcucagaucaaagagagccugagagccgagcugagagugacagaaagacgggccgaagugcccacagcucacccuucaccuucuccaagaccugccggccaguuccagacacuggucgugggaguuguuggcggacugcugggaucucuggugcugcuuguuugggugcucgccgugaucuguagcagagccgccagaggaacaaucggcgccagaaggacaggccagccucugaaagaggaucccucugcuguccccguguucagcguggacuauggcgagcuggauuuccaguggcgggaaaagacacccgagccuccagugccuugugugccugagcagacagaguacgccaccaucguguucccuagcggcaugggcacaucuagcccugccagaagaggaucugccgacggaccuagaucugcccagccucucagaccugaggauggccacuguagcuggccucuguaaggacuagugcaucacauuuaaaagcaucucagccuaccaugagaauaagagaaagaaaaugaagaucaauagcuuauucaucucuuuuucuuuuucguugguguaaagccaacacccugucuaaaaaacauaaauuucuuuaaucauuuugccucuuuucucugugcuucaauuaauaaaaaauggaaagaaccuagaucuaaaaaaaaaaaaaaaaaaaaaaaaaaaaaaaaaaaaaaaaaaaaaaaaaaaaaaaaaaaaaaaaugcaucccccccccccccccccccccccccccccccaaaggcucuuuucagagccaccagaauu

SEQ ID NO: 321 - RNA, 832 nt, Artificial Sequence
  PDCD1(1-149) mRNA product TOP UTR opt3v
ggggcgcugccuacggagguggcagccaucuccuucucggcaucaagcuuaccaugcagaucccucaggcuccuuggccuguugugugggcuguucugcaacuuggauggcggccuggcugguuccuggacucuccugacagacccuggaauccuccaacauucagccccgcucugcuggugguuaccgagggcgauaaugccaccuucaccuguagcuucagcaacaccagcgagagcuucgugcugaacugguacagaaugagccccagcaaccagaccgacaagcuggccgccuuuccugaggauagaucucagcccggccaggacugccgguucagaguuacacagcugcccaacggccgggacuuccacaugucugucguccgggccagaagaaacgacagcggcacauaucugugcggcgccauuucucuggccccuaaggcucagaucaaagagagccugagagccgagcugagagugacagaaagacgggccugaggacuagugcaucacauuuaaaagcaucucagccuaccaugagaauaagagaaagaaaaugaagaucaauagcuuauucaucucuuuuucuuuuucguugguguaaagccaacacccugucuaaaaaacauaaauuucuuuaaucauuuugccucuuuucucugugcuucaauuaauaaaaaauggaaagaaccuagaucuaaaaaaaaaaaaaaaaaaaaaaaaaaaaaaaaaaaaaaaaaaaaaaaaaaaaaaaaaaaaaaaaugcaucccccccccccccccccccccccccccccccaaaggcucuuuucagagccaccagaauu

SEQ ID NO: 322 - RNA, 1042 nt, Artificial Sequence
  IL12A mRNA product TOP UTR opt3v
ggggcgcugccuacggagguggcagccaucuccuucucggcaucaagcuuaccaugugcccugccagaucucugcugcugguggcuacacuggugcugcuggaucaucugagccuggccagaaaccugccaguggccacgccugauccuggcauguuuccuugucugcaccacagccagaaccugcugagagccguguccaacaugcugcagaaggccagacagacccucgaguucuaccccugcaccagcgaggaaaucgaccacgaggacaucaccaaggacaagaccagcaccguggaagccugccugccucuggaacugaccaagaacgagagcugccugaacagccgggaaaccagcuucaucaccaacggcucuugccuggccuccagaaagaccuccuucaugauggcccugugccugagcagcaucuacgaggaccugaagauguaccaggucgaguucaagaccaugaacgccaagcugcugauggaccccaagcggcagaucuuccuggaccagaauaugcuggccgugaucgacgagcugaugcaggcccugaacuucaacagcgagacagugccccagaaguccagccuggaagaacccgacuucuacaagaccaagaucaagcugugcauccugcugcacgccuuccggaucagagccgugaccaucgacagagugaugagcuaccugaacgccuccugaggacuagugcaucacauuuaaaagcaucucagccuaccaugagaauaagagaaagaaaaugaagaucaauagcuuauucaucucuuuuucuuuuucguugguguaaagccaacacccugucuaaaaaacauaaauuucuuuaaucauuuugccucuuuucucugugcuucaauuaauaaaaaauggaaagaaccuagaucuaaaaaaaaaaaaaaaaaaaaaaaaaaaaaaaaaaaaaaaaaaaaaaaaaaaaaaaaaaaaaaaaugcaucccccccccccccccccccccccccccccccaaaggcucuuuucagagccaccagaauu

SEQ ID NO: 323 - RNA, 1039 nt, Artificial Sequence
  IL12A(1-219) mRNA product TOP UTR opt3v
ggggcgcugccuacggagguggcagccaucuccuucucggcaucaagcuuaccaugugcccugccagaucucugcugcugguggcuacacuggugcugcuggaucaucugagccuggccagaaaccugccaguggccacgccugauccuggcauguuuccuugucugcaccacagccagaaccugcugagagccguguccaacaugcugcagaaggccagacagacccucgaguucuaccccugcaccagcgaggaaaucgaccacgaggacaucaccaaggacaagaccagcaccguggaagccugccugccucuggaacugaccaagaacgagagcugccugaacagccgggaaaccagcuucaucaccaacggcucuugccuggccuccagaaagaccuccuucaugauggcccugugccugagcagcaucuacgaggaccugaagauguaccaggucgaguucaagaccaugaacgccaagcugcugauggaccccaagcggcagaucuuccuggaccagaauaugcuggccgugaucgacgagcugaugcaggcccugaacuucaacagcgagacagugccccagaaguccagccuggaagaacccgacuucuacaagaccaagaucaagcugugcauccugcugcacgccuuccggaucagagccgugaccaucgacagagugaugagcuaccugaacgccuccggacuagugcaucacauuuaaaagcaucucagccuaccaugagaauaagagaaagaaaaugaagaucaauagcuuauucaucucuuuuucuuuuucguugguguaaagccaacacccugucuaaaaaacauaaauuucuuuaaucauuuugccucuuuucucugugcuucaauuaauaaaaaauggaaagaaccuagaucuaaaaaaaaaaaaaaaaaaaaaaaaaaaaaaaaaaaaaaaaaaaaaaaaaaaaaaaaaaaaaaaaugcaucccccccccccccccccccccccccccccccaaaggcucuuuucagagccaccagaauu

SEQ ID NO: 324 - RNA, 976 nt, Artificial Sequence
  IL12A(23-219) mRNA product TOP UTR opt3v
ggggcgcugccuacggagguggcagccaucuccuucucggcaucaagcuuaccagaaaccugccaguggccacgccugauccuggcauguuuccuugucugcaccacagccagaaccugcugagagccguguccaacaugcugcagaaggccagacagacccucgaguucuaccccugcaccagcgaggaaaucgaccacgaggacaucaccaaggacaagaccagcaccguggaagccugccugccucuggaacugaccaagaacgagagcugccugaacagccgggaaaccagcuucaucaccaacggcucuugccuggccuccagaaagaccuccuucaugauggcccugugccugagcagcaucuacgaggaccugaagauguaccaggucgaguucaagaccaugaacgccaagcugcugauggaccccaagcggcagaucuuccuggaccagaauaugcuggccgugaucgacgagcugaugcaggcccugaacuucaacagcgagacagugccccagaaguccagccuggaagaacccgacuucuacaagaccaagaucaagcugugcauccugcugcacgccuuccggaucagagccgugaccaucgacagagugaugagcuaccugaacgccuccugaggacuagugcaucacauuuaaaagcaucucagccuaccaugagaauaagagaaagaaaaugaagaucaauagcuuauucaucucuuuuucuuuuucguugguguaaagccaacacccugucuaaaaaacauaaauuucuuuaaucauuuugccucuuuucucugugcuucaauuaauaaaaaauggaaagaaccuagaucuaaaaaaaaaaaaaaaaaaaaaaaaaaaaaaaaaaaaaaaaaaaaaaaaaaaaaaaaaaaaaaaaugcaucccccccccccccccccccccccccccccccaaaggcucuuuucagagccaccagaauu

SEQ ID NO: 325 - RNA, 1369 nt, Artificial Sequence
  IL12B mRNA product TOP UTR opt3v
ggggcgcugccuacggagguggcagccaucuccuucucggcaucaagcuuaccaugugucaccagcagcuggucaucagcugguucagccugguguuccuggccucuccucugguggccaucugggagcugaagaaagacguguacgugguggaacuggacugguaucccgaugcuccuggcgagaugguggugcugaccugcgauaccccugaagaggacggcaucaccuggacacuggaucagucuagcgaggugcucggcagcggcaagacccugaccauccaagugaaagaguuuggcgacgccggccaguacaccugucacaaaggcggagaagugcugagccacagccugcugcugcuccacaagaaagaggauggcauuuggagcaccgacauccugaaggaccagaaagagcccaagaacaagaccuuccugagaugcgaggccaagaacuacagcggccgguucacauguugguggcugaccaccaucagcaccgaccugaccuucagcgugaaguccagcagaggcagcagugauccucagggcguuacauguggcgccgcuacacugucugccgaaagagugcggggcgacaacaaagaauacgaguacagcguggaaugccaagaggacagcgccuguccagccgccgaagagucucugccuaucgaagugaugguggacgccgugcacaagcugaaguacgagaacuacaccuccagcuuuuucauccgggacaucaucaagcccgauccuccaaagaaccugcagcugaagccucugaagaacagcagacagguggaaguguccugggaguaccccgacaccuggucuacaccccacagcuacuucagccugaccuuuugcgugcaagugcagggcaaguccaagcgcgagaaaaaggaccggguguucaccgacaagaccagcgccaccgugaucugcagaaagaacgccagcaucagcgucagagcccaggaccgguacuacagcagcucuuggagcgaaugggccagcgugccauguagcuaaggacuagugcaucacauuuaaaagcaucucagccuaccaugagaauaagagaaagaaaaugaagaucaauagcuuauucaucucuuuuucuuuuucguugguguaaagccaacacccugucuaaaaaacauaaauuucuuuaaucauuuugccucuuuucucugugcuucaauuaauaaaaaauggaaagaaccuagaucuaaaaaaaaaaaaaaaaaaaaaaaaaaaaaaaaaaaaaaaaaaaaaaaaaaaaaaaaaaaaaaaaugcaucccccccccccccccccccccccccccccccaaaggcucuuuucagagccaccagaauu

SEQ ID NO: 326 - RNA, 1366 nt, Artificial Sequence
  IL12B(1-328) mRNA product TOP UTR opt3v
ggggcgcugccuacggagguggcagccaucuccuucucggcaucaagcuuaccaugugucaccagcagcuggucaucagcugguucagccugguguuccuggccucuccucugguggccaucugggagcugaagaaagacguguacgugguggaacuggacugguaucccgaugcuccuggcgagaugguggugcugaccugcgauaccccugaagaggacggcaucaccuggacacuggaucagucuagcgaggugcucggcagcggcaagacccugaccauccaagugaaagaguuuggcgacgccggccaguacaccugucacaaaggcggagaagugcugagccacagccugcugcugcuccacaagaaagaggauggcauuuggagcaccgacauccugaaggaccagaaagagcccaagaacaagaccuuccugagaugcgaggccaagaacuacagcggccgguucacauguugguggcugaccaccaucagcaccgaccugaccuucagcgugaaguccagcagaggcagcagugauccucagggcguuacauguggcgccgcuacacugucugccgaaagagugcggggcgacaacaaagaauacgaguacagcguggaaugccaagaggacagcgccuguccagccgccgaagagucucugccuaucgaagugaugguggacgccgugcacaagcugaaguacgagaacuacaccuccagcuuuuucauccgggacaucaucaagcccgauccuccaaagaaccugcagcugaagccucugaagaacagcagacagguggaaguguccugggaguaccccgacaccuggucuacaccccacagcuacuucagccugaccuuuugcgugcaagugcagggcaaguccaagcgcgagaaaaaggaccggguguucaccgacaagaccagcgccaccgugaucugcagaaagaacgccagcaucagcgucagagcccaggaccgguacuacagcagcucuuggagcgaaugggccagcgugccauguagcggacuagugcaucacauuuaaaagcaucucagccuaccaugagaauaagagaaagaaaaugaagaucaauagcuuauucaucucuuuuucuuuuucguugguguaaagccaacacccugucuaaaaaacauaaauuucuuuaaucauuuugccucuuuucucugugcuucaauuaauaaaaaauggaaagaaccuagaucuaaaaaaaaaaaaaaaaaaaaaaaaaaaaaaaaaaaaaaaaaaaaaaaaaaaaaaaaaaaaaaaaugcaucccccccccccccccccccccccccccccccaaaggcucuuuucagagccaccagaauu

SEQ ID NO: 327 - RNA, 1303 nt, Artificial Sequence
  IL12B(23-328) mRNA product TOP UTR opt3v
ggggcgcugccuacggagguggcagccaucuccuucucggcaucaagcuuaccaucugggagcugaagaaagacguguacgugguggaacuggacugguaucccgaugcuccuggcgagaugguggugcugaccugcgauaccccugaagaggacggcaucaccuggacacuggaucagucuagcgaggugcucggcagcggcaagacccugaccauccaagugaaagaguuuggcgacgccggccaguacaccugucacaaaggcggagaagugcugagccacagccugcugcugcuccacaagaaagaggauggcauuuggagcaccgacauccugaaggaccagaaagagcccaagaacaagaccuuccugagaugcgaggccaagaacuacagcggccgguucacauguugguggcugaccaccaucagcaccgaccugaccuucagcgugaaguccagcagaggcagcagugauccucagggcguuacauguggcgccgcuacacugucugccgaaagagugcggggcgacaacaaagaauacgaguacagcguggaaugccaagaggacagcgccuguccagccgccgaagagucucugccuaucgaagugaugguggacgccgugcacaagcugaaguacgagaacuacaccuccagcuuuuucauccgggacaucaucaagcccgauccuccaaagaaccugcagcugaagccucugaagaacagcagacagguggaaguguccugggaguaccccgacaccuggucuacaccccacagcuacuucagccugaccuuuugcgugcaagugcagggcaaguccaagcgcgagaaaaaggaccggguguucaccgacaagaccagcgccaccgugaucugcagaaagaacgccagcaucagcgucagagcccaggaccgguacuacagcagcucuuggagcgaaugggccagcgugccauguagcuaaggacuagugcaucacauuuaaaagcaucucagccuaccaugagaauaagagaaagaaaaugaagaucaauagcuuauucaucucuuuuucuuuuucguugguguaaagccaacacccugucuaaaaaacauaaauuucuuuaaucauuuugccucuuuucucugugcuucaauuaauaaaaaauggaaagaaccuagaucuaaaaaaaaaaaaaaaaaaaaaaaaaaaaaaaaaaaaaaaaaaaaaaaaaaaaaaaaaaaaaaaaugcaucccccccccccccccccccccccccccccccaaaggcucuuuucagagccaccagaauu

SEQ ID NO: 328 - RNA, 436 nt, Artificial Sequence
  Linker-sFvCC49-218 mRNA product TOP UTR opt3v
ggggcgcugccuacggagguggcagccaucuccuucucggcaucaagcuuaccggcucuacaucuggcucuggcaaaccuggaucuggcgagggcucuacaaagggcggacuagugcaucacauuuaaaagcaucucagccuaccaugagaauaagagaaagaaaaugaagaucaauagcuuauucaucucuuuuucuuuuucguugguguaaagccaacacccugucuaaaaaacauaaauuucuuuaaucauuuugccucuuuucucugugcuucaauuaauaaaaaauggaaagaaccuagaucuaaaaaaaaaaaaaaaaaaaaaaaaaaaaaaaaaaaaaaaaaaaaaaaaaaaaaaaaaaaaaaaaugcaucccccccccccccccccccccccccccccccaaaggcucuuuucagagccaccagaauu

SEQ ID NO: 329 - RNA, 2014 nt, Artificial Sequence
  IL12 mRNA product TOP UTR opt3v
ggggcgcugccuacggagguggcagccaucuccuucucggcaucaagcuuaccaugugucaccagcagcuggucaucagcugguucagccugguguuccuggccucuccucugguggccaucugggagcugaagaaagacguguacgugguggaacuggacugguaucccgaugcuccuggcgagaugguggugcugaccugcgauaccccugaagaggacggcaucaccuggacacuggaucagucuagcgaggugcucggcagcggcaagacccugaccauccaagugaaagaguuuggcgacgccggccaguacaccugucacaaaggcggagaagugcugagccacagccugcugcugcuccacaagaaagaggauggcauuuggagcaccgacauccugaaggaccagaaagagcccaagaacaagaccuuccugagaugcgaggccaagaacuacagcggccgguucacauguugguggcugaccaccaucagcaccgaccugaccuucagcgugaaguccagcagaggcagcagugauccucagggcguuacauguggcgccgcuacacugucugccgaaagagugcggggcgacaacaaagaauacgaguacagcguggaaugccaagaggacagcgccuguccagccgccgaagagucucugccuaucgaagugaugguggacgccgugcacaagcugaaguacgagaacuacaccuccagcuuuuucauccgggacaucaucaagcccgauccuccaaagaaccugcagcugaagccucugaagaacagcagacagguggaaguguccugggaguaccccgacaccuggucuacaccccacagcuacuucagccugaccuuuugcgugcaagugcagggcaaguccaagcgcgagaaaaaggaccggguguucaccgacaagaccagcgccaccgugaucugcagaaagaacgccagcaucagcgucagagcccaggaccgguacuacagcagcucuuggagcgaaugggccagcgugccauguagcggcucuacaucuggcucuggcaaaccuggaucuggcgagggcucuacaaagggcagaaaccugccaguggccacgccugauccuggcauguuuccuugucugcaccacagccagaaccugcugagagccguguccaacaugcugcagaaggccagacagacccucgaguucuaccccugcaccagcgaggaaaucgaccacgaggacaucaccaaggacaagaccagcaccguggaagccugccugccucuggaacugaccaagaacgagagcugccugaacagccgggaaaccagcuucaucaccaacggcucuugccuggccuccagaaagaccuccuucaugauggcccugugccugagcagcaucuacgaggaccugaagauguaccaggucgaguucaagaccaugaacgccaagcugcugauggaccccaagcggcagaucuuccuggaccagaauaugcuggccgugaucgacgagcugaugcaggcccugaacuucaacagcgagacagugccccagaaguccagccuggaagaacccgacuucuacaagaccaagaucaagcugugcauccugcugcacgccuuccggaucagagccgugaccaucgacagagugaugagcuaccugaacgccuccugaggacuagugcaucacauuuaaaagcaucucagccuaccaugagaauaagagaaagaaaaugaagaucaauagcuuauucaucucuuuuucuuuuucguugguguaaagccaacacccugucuaaaaaacauaaauuucuuuaaucauuuugccucuuuucucugugcuucaauuaauaaaaaauggaaagaaccuagaucuaaaaaaaaaaaaaaaaaaaaaaaaaaaaaaaaaaaaaaaaaaaaaaaaaaaaaaaaaaaaaaaaugcaucccccccccccccccccccccccccccccccaaaggcucuuuucagagccaccagaauu

SEQ ID NO: 330 - RNA, 1168 nt, Artificial Sequence
  CD40LG mRNA product TOP UTR opt3v
ggggcgcugccuacggagguggcagccaucuccuucucggcaucaagcuuaccaugaucgagacauacaaccagacaagccccagaagcgccgccacaggacugccuaucagcaugaagaucuuuauguaccugcugaccguguuccugaucacccagaugaucggcagcgcccuguuugccguguaccugcacagacggcuggacaagaucgaggacgagagaaaccugcacgaggacuucguguucaugaagaccauccagcggugcaacaccggcgagagaagucugagccugcugaacugcgaggaaaucaagagccaguucgagggcuucgugaaggacaucaugcugaacaaagaggaaacgaagaaagaaaacuccuucgagaugcagaagggcgaccagaauccucagaucgccgcucacgugaucagcgaggccagcagcaagacaacaagcgugcugcagugggccgagaagggcuacuacaccaugagcaacaaccuggucacccuggaaaacggcaagcagcugacagugaagcggcagggccuguacuacaucuacgcccaagugaccuucugcagcaacagagaggccagcucucaggccccuuuuaucgccagccugugccugaaguccccuggcagauucgagcggauucugcugagagccgccaacacacacagcagcgccaaaccuuguggccagcagucuauucaccucggcggaguguuugagcugcagccuggcgcaagcguguucgugaaugugacagacccuagccaggugucccacggcaccggcuuuacaucuuucggacugcugaagcugugaggacuagugcaucacauuuaaaagcaucucagccuaccaugagaauaagagaaagaaaaugaagaucaauagcuuauucaucucuuuuucuuuuucguugguguaaagccaacacccugucuaaaaaacauaaauuucuuuaaucauuuugccucuuuucucugugcuucaauuaauaaaaaauggaaagaaccuagaucuaaaaaaaaaaaaaaaaaaaaaaaaaaaaaaaaaaaaaaaaaaaaaaaaaaaaaaaaaaaaaaaaugcaucccccccccccccccccccccccccccccccaaaggcucuuuucagagccaccagaauu

SEQ ID NO: 331 - RNA, 1249 nt, Artificial Sequence
  PDCD1 mRNA product TOP UTR opt4
ggggcgcugccuacggagguggcagccaucuccuucucggcaucaagcuuaccaugcagaucccccaggcccccuggcccguggugugggccgugcugcagcugggcuggagacccggcugguuccuggacagccccgacagacccuggaacccccccaccuucagccccgcccugcugguggugaccgagggcgacaacgccaccuucaccuguagcuucagcaacaccagcgagagcuucgugcugaacugguacagaaugagccccagcaaccagaccgacaagcuggccgccuuccccgaggacagaagccagcccggccaggacugcagauucagagugacccagcugcccaacggcagagacuuccacaugagcguggugagagccagaagaaacgacagcggcaccuaccugugcggcgccaucagccuggcccccaaggcccagaucaaggagagccugagagccgagcugagagugaccgagagaagggccgaggugcccaccgcccaccccagccccagccccagacccgccggccaguuccagacccugguggugggcguggugggcggccugcugggcagccuggugcugcuggugugggugcuggccgugaucugcagcagagccgccagaggcaccaucggcgccagaagaaccggccagccccugaaggaggaccccagcgccgugcccguguucagcguggacuacggcgagcuggacuuccaguggagagagaagacccccgagccccccgugcccugcgugcccgagcagaccgaguacgccaccaucguguuccccagcggcaugggcaccagcagccccgccagaagaggcagcgccgacggccccagaagcgcccagccccugagacccgaggacggccacugcagcuggccccugugaggacuagugcaucacauuuaaaagcaucucagccuaccaugagaauaagagaaagaaaaugaagaucaauagcuuauucaucucuuuuucuuuuucguugguguaaagccaacacccugucuaaaaaacauaaauuucuuuaaucauuuugccucuuuucucugugcuucaauuaauaaaaaauggaaagaaccuagaucuaaaaaaaaaaaaaaaaaaaaaaaaaaaaaaaaaaaaaaaaaaaaaaaaaaaaaaaaaaaaaaaaugcaucccccccccccccccccccccccccccccccaaaggcucuuuucagagccaccagaauu

SEQ ID NO: 332 - RNA, 832 nt, Artificial Sequence
  PDCD1(1-149) mRNA product TOP UTR opt4
ggggcgcugccuacggagguggcagccaucuccuucucggcaucaagcuuaccaugcagaucccccaggcccccuggcccguggugugggccgugcugcagcugggcuggagacccggcugguuccuggacagccccgacagacccuggaacccccccaccuucagccccgcccugcugguggugaccgagggcgacaacgccaccuucaccuguagcuucagcaacaccagcgagagcuucgugcugaacugguacagaaugagccccagcaaccagaccgacaagcuggccgccuuccccgaggacagaagccagcccggccaggacugcagauucagagugacccagcugcccaacggcagagacuuccacaugagcguggugagagccagaagaaacgacagcggcaccuaccugugcggcgccaucagccuggcccccaaggcccagaucaaggagagccugagagccgagcugagagugaccgagagaagggccugaggacuagugcaucacauuuaaaagcaucucagccuaccaugagaauaagagaaagaaaaugaagaucaauagcuuauucaucucuuuuucuuuuucguugguguaaagccaacacccugucuaaaaaacauaaauuucuuuaaucauuuugccucuuuucucugugcuucaauuaauaaaaaauggaaagaaccuagaucuaaaaaaaaaaaaaaaaaaaaaaaaaaaaaaaaaaaaaaaaaaaaaaaaaaaaaaaaaaaaaaaaugcaucccccccccccccccccccccccccccccccaaaggcucuuuucagagccaccagaauu

SEQ ID NO: 333 - RNA, 1042 nt, Artificial Sequence
  IL12A mRNA product TOP UTR opt4
ggggcgcugccuacggagguggcagccaucuccuucucggcaucaagcuuaccaugugccccgccagaagccugcugcugguggccacccuggugcugcuggaccaccugagccuggccagaaaccugcccguggccacccccgaccccggcauguuccccugccugcaccacagccagaaccugcugagagccgugagcaacaugcugcagaaggccagacagacccuggaguucuaccccugcaccagcgaggagaucgaccacgaggacaucaccaaggacaagaccagcaccguggaggccugccugccccuggagcugaccaagaacgagagcugccugaacagcagagagaccagcuucaucaccaacggcagcugccuggccagcagaaagaccagcuucaugauggcccugugccugagcagcaucuacgaggaccugaagauguaccagguggaguucaagaccaugaacgccaagcugcugauggaccccaagagacagaucuuccuggaccagaacaugcuggccgugaucgacgagcugaugcaggcccugaacuucaacagcgagaccgugccccagaagaguagccuggaggagcccgacuucuacaagaccaagaucaagcugugcauccugcugcacgccuucagaaucagagccgugaccaucgacagagugaugagcuaccugaacgccagcugaggacuagugcaucacauuuaaaagcaucucagccuaccaugagaauaagagaaagaaaaugaagaucaauagcuuauucaucucuuuuucuuuuucguugguguaaagccaacacccugucuaaaaaacauaaauuucuuuaaucauuuugccucuuuucucugugcuucaauuaauaaaaaauggaaagaaccuagaucuaaaaaaaaaaaaaaaaaaaaaaaaaaaaaaaaaaaaaaaaaaaaaaaaaaaaaaaaaaaaaaaaugcaucccccccccccccccccccccccccccccccaaaggcucuuuucagagccaccagaauu

SEQ ID NO: 334 - RNA, 1039 nt, Artificial Sequence
  IL12A(1-219) mRNA product TOP UTR opt4
ggggcgcugccuacggagguggcagccaucuccuucucggcaucaagcuuaccaugugccccgccagaagccugcugcugguggccacccuggugcugcuggaccaccugagccuggccagaaaccugcccguggccacccccgaccccggcauguuccccugccugcaccacagccagaaccugcugagagccgugagcaacaugcugcagaaggccagacagacccuggaguucuaccccugcaccagcgaggagaucgaccacgaggacaucaccaaggacaagaccagcaccguggaggccugccugccccuggagcugaccaagaacgagagcugccugaacagcagagagaccagcuucaucaccaacggcagcugccuggccagcagaaagaccagcuucaugauggcccugugccugagcagcaucuacgaggaccugaagauguaccagguggaguucaagaccaugaacgccaagcugcugauggaccccaagagacagaucuuccuggaccagaacaugcuggccgugaucgacgagcugaugcaggcccugaacuucaacagcgagaccgugccccagaagaguagccuggaggagcccgacuucuacaagaccaagaucaagcugugcauccugcugcacgccuucagaaucagagccgugaccaucgacagagugaugagcuaccugaacgccagcggacuagugcaucacauuuaaaagcaucucagccuaccaugagaauaagagaaagaaaaugaagaucaauagcuuauucaucucuuuuucuuuuucguugguguaaagccaacacccugucuaaaaaacauaaauuucuuuaaucauuuugccucuuuucucugugcuucaauuaauaaaaaauggaaagaaccuagaucuaaaaaaaaaaaaaaaaaaaaaaaaaaaaaaaaaaaaaaaaaaaaaaaaaaaaaaaaaaaaaaaaugcaucccccccccccccccccccccccccccccccaaaggcucuuuucagagccaccagaauu

SEQ ID NO: 335 - RNA, 976 nt, Artificial Sequence
  IL12A(23-219) mRNA product TOP UTR opt4
ggggcgcugccuacggagguggcagccaucuccuucucggcaucaagcuuaccagaaaccugcccguggccacccccgaccccggcauguuccccugccugcaccacagccagaaccugcugagagccgugagcaacaugcugcagaaggccagacagacccuggaguucuaccccugcaccagcgaggagaucgaccacgaggacaucaccaaggacaagaccagcaccguggaggccugccugccccuggagcugaccaagaacgagagcugccugaacagcagagagaccagcuucaucaccaacggcagcugccuggccagcagaaagaccagcuucaugauggcccugugccugagcagcaucuacgaggaccugaagauguaccagguggaguucaagaccaugaacgccaagcugcugauggaccccaagagacagaucuuccuggaccagaacaugcuggccgugaucgacgagcugaugcaggcccugaacuucaacagcgagaccgugccccagaagaguagccuggaggagcccgacuucuacaagaccaagaucaagcugugcauccugcugcacgccuucagaaucagagccgugaccaucgacagagugaugagcuaccugaacgccagcugaggacuagugcaucacauuuaaaagcaucucagccuaccaugagaauaagagaaagaaaaugaagaucaauagcuuauucaucucuuuuucuuuuucguugguguaaagccaacacccugucuaaaaaacauaaauuucuuuaaucauuuugccucuuuucucugugcuucaauuaauaaaaaauggaaagaaccuagaucuaaaaaaaaaaaaaaaaaaaaaaaaaaaaaaaaaaaaaaaaaaaaaaaaaaaaaaaaaaaaaaaaugcaucccccccccccccccccccccccccccccccaaaggcucuuuucagagccaccagaauu

SEQ ID NO: 336 - RNA, 1369 nt, Artificial Sequence
  IL12B mRNA product TOP UTR opt4
ggggcgcugccuacggagguggcagccaucuccuucucggcaucaagcuuaccaugugccaccagcagcuggugaucagcugguucagccugguguuccuggccagcccccugguggccaucugggagcugaagaaggacguguacgugguggagcuggacugguaccccgacgcccccggcgagaugguggugcugaccugcgacacccccgaggaggacggcaucaccuggacccuggaccagagcagcgaggugcugggcagcggcaagacccugaccauccaggugaaggaguucggcgacgccggccaguacaccugucacaagggcggcgaggugcugagccacagccugcugcugcugcacaagaaggaggacggcaucuggagcaccgacauccugaaggaccagaaggagcccaagaacaagaccuuccugagaugcgaggccaagaacuacagcggcagauucaccuguugguggcugaccaccaucagcaccgaccugaccuucagcgugaagaguagcagaggcagcagcgacccccagggcgugaccugcggcgccgccacccugagcgccgagagagugagaggcgacaacaaggaguacgaguacagcguggagugccaggaggacagcgccugccccgccgccgaggagagccugcccaucgaggugaugguggacgccgugcacaagcugaaguacgagaacuacaccagcagcuucuucaucagagacaucaucaagcccgacccccccaagaaccugcagcugaagccccugaagaacagcagacagguggaggugagcugggaguaccccgacaccuggagcaccccccacagcuacuucagccugaccuucugcgugcagguucagggcaagagcaagagagagaagaaggacagaguguucaccgacaagaccagcgccaccgugaucugcagaaagaacgccagcaucagcgugagagcccaggacagauacuacagcagcagcuggagcgagugggccagcgugcccugcagcugaggacuagugcaucacauuuaaaagcaucucagccuaccaugagaauaagagaaagaaaaugaagaucaauagcuuauucaucucuuuuucuuuuucguugguguaaagccaacacccugucuaaaaaacauaaauuucuuuaaucauuuugccucuuuucucugugcuucaauuaauaaaaaauggaaagaaccuagaucuaaaaaaaaaaaaaaaaaaaaaaaaaaaaaaaaaaaaaaaaaaaaaaaaaaaaaaaaaaaaaaaaugcaucccccccccccccccccccccccccccccccaaaggcucuuuucagagccaccagaauu

SEQ ID NO: 337 - RNA, 1366 nt, Artificial Sequence
  IL12B(1-328) mRNA product TOP UTR opt4
ggggcgcugccuacggagguggcagccaucuccuucucggcaucaagcuuaccaugugccaccagcagcuggugaucagcugguucagccugguguuccuggccagcccccugguggccaucugggagcugaagaaggacguguacgugguggagcuggacugguaccccgacgcccccggcgagaugguggugcugaccugcgacacccccgaggaggacggcaucaccuggacccuggaccagagcagcgaggugcugggcagcggcaagacccugaccauccaggugaaggaguucggcgacgccggccaguacaccugucacaagggcggcgaggugcugagccacagccugcugcugcugcacaagaaggaggacggcaucuggagcaccgacauccugaaggaccagaaggagcccaagaacaagaccuuccugagaugcgaggccaagaacuacagcggcagauucaccuguugguggcugaccaccaucagcaccgaccugaccuucagcgugaagaguagcagaggcagcagcgacccccagggcgugaccugcggcgccgccacccugagcgccgagagagugagaggcgacaacaaggaguacgaguacagcguggagugccaggaggacagcgccugccccgccgccgaggagagccugcccaucgaggugaugguggacgccgugcacaagcugaaguacgagaacuacaccagcagcuucuucaucagagacaucaucaagcccgacccccccaagaaccugcagcugaagccccugaagaacagcagacagguggaggugagcugggaguaccccgacaccuggagcaccccccacagcuacuucagccugaccuucugcgugcagguucagggcaagagcaagagagagaagaaggacagaguguucaccgacaagaccagcgccaccgugaucugcagaaagaacgccagcaucagcgugagagcccaggacagauacuacagcagcagcuggagcgagugggccagcgugcccugcagcggacuagugcaucacauuuaaaagcaucucagccuaccaugagaauaagagaaagaaaaugaagaucaauagcuuauucaucucuuuuucuuuuucguugguguaaagccaacacccugucuaaaaaacauaaauuucuuuaaucauuuugccucuuuucucugugcuucaauuaauaaaaaauggaaagaaccuagaucuaaaaaaaaaaaaaaaaaaaaaaaaaaaaaaaaaaaaaaaaaaaaaaaaaaaaaaaaaaaaaaaaugcaucccccccccccccccccccccccccccccccaaaggcucuuuucagagccaccagaauu

SEQ ID NO: 338 - RNA, 1303 nt, Artificial Sequence
  IL12B(23-328) mRNA product TOP UTR opt4
ggggcgcugccuacggagguggcagccaucuccuucucggcaucaagcuuaccaucugggagcugaagaaggacguguacgugguggagcuggacugguaccccgacgcccccggcgagaugguggugcugaccugcgacacccccgaggaggacggcaucaccuggacccuggaccagagcagcgaggugcugggcagcggcaagacccugaccauccaggugaaggaguucggcgacgccggccaguacaccugucacaagggcggcgaggugcugagccacagccugcugcugcugcacaagaaggaggacggcaucuggagcaccgacauccugaaggaccagaaggagcccaagaacaagaccuuccugagaugcgaggccaagaacuacagcggcagauucaccuguugguggcugaccaccaucagcaccgaccugaccuucagcgugaagaguagcagaggcagcagcgacccccagggcgugaccugcggcgccgccacccugagcgccgagagagugagaggcgacaacaaggaguacgaguacagcguggagugccaggaggacagcgccugccccgccgccgaggagagccugcccaucgaggugaugguggacgccgugcacaagcugaaguacgagaacuacaccagcagcuucuucaucagagacaucaucaagcccgacccccccaagaaccugcagcugaagccccugaagaacagcagacagguggaggugagcugggaguaccccgacaccuggagcaccccccacagcuacuucagccugaccuucugcgugcagguucagggcaagagcaagagagagaagaaggacagaguguucaccgacaagaccagcgccaccgugaucugcagaaagaacgccagcaucagcgugagagcccaggacagauacuacagcagcagcuggagcgagugggccagcgugcccugcagcugaggacuagugcaucacauuuaaaagcaucucagccuaccaugagaauaagagaaagaaaaugaagaucaauagcuuauucaucucuuuuucuuuuucguugguguaaagccaacacccugucuaaaaaacauaaauuucuuuaaucauuuugccucuuuucucugugcuucaauuaauaaaaaauggaaagaaccuagaucuaaaaaaaaaaaaaaaaaaaaaaaaaaaaaaaaaaaaaaaaaaaaaaaaaaaaaaaaaaaaaaaaugcaucccccccccccccccccccccccccccccccaaaggcucuuuucagagccaccagaauu

SEQ ID NO: 339 - RNA, 436 nt, Artificial Sequence
  Linker-sFvCC49-218 mRNA product TOP UTR opt4
ggggcgcugccuacggagguggcagccaucuccuucucggcaucaagcuuaccggcagcaccagcggcagcggcaagcccggcagcggcgagggcagcaccaagggcggacuagugcaucacauuuaaaagcaucucagccuaccaugagaauaagagaaagaaaaugaagaucaauagcuuauucaucucuuuuucuuuuucguugguguaaagccaacacccugucuaaaaaacauaaauuucuuuaaucauuuugccucuuuucucugugcuucaauuaauaaaaaauggaaagaaccuagaucuaaaaaaaaaaaaaaaaaaaaaaaaaaaaaaaaaaaaaaaaaaaaaaaaaaaaaaaaaaaaaaaaugcaucccccccccccccccccccccccccccccccaaaggcucuuuucagagccaccagaauu

SEQ ID NO: 340 - RNA, 2014 nt, Artificial Sequence
  IL12 mRNA product TOP UTR opt4
ggggcgcugccuacggagguggcagccaucuccuucucggcaucaagcuuaccaugugccaccagcagcuggugaucagcugguucagccugguguuccuggccagcccccugguggccaucugggagcugaagaaggacguguacgugguggagcuggacugguaccccgacgcccccggcgagaugguggugcugaccugcgacacccccgaggaggacggcaucaccuggacccuggaccagagcagcgaggugcugggcagcggcaagacccugaccauccaggugaaggaguucggcgacgccggccaguacaccugucacaagggcggcgaggugcugagccacagccugcugcugcugcacaagaaggaggacggcaucuggagcaccgacauccugaaggaccagaaggagcccaagaacaagaccuuccugagaugcgaggccaagaacuacagcggcagauucaccuguugguggcugaccaccaucagcaccgaccugaccuucagcgugaagaguagcagaggcagcagcgacccccagggcgugaccugcggcgccgccacccugagcgccgagagagugagaggcgacaacaaggaguacgaguacagcguggagugccaggaggacagcgccugccccgccgccgaggagagccugcccaucgaggugaugguggacgccgugcacaagcugaaguacgagaacuacaccagcagcuucuucaucagagacaucaucaagcccgacccccccaagaaccugcagcugaagccccugaagaacagcagacagguggaggugagcugggaguaccccgacaccuggagcaccccccacagcuacuucagccugaccuucugcgugcagguucagggcaagagcaagagagagaagaaggacagaguguucaccgacaagaccagcgccaccgugaucugcagaaagaacgccagcaucagcgugagagcccaggacagauacuacagcagcagcuggagcgagugggccagcgugcccugcagcggcagcaccagcggcagcggcaagcccggcagcggcgagggcagcaccaagggcagaaaccugcccguggccacccccgaccccggcauguuccccugccugcaccacagccagaaccugcugagagccgugagcaacaugcugcagaaggccagacagacccuggaguucuaccccugcaccagcgaggagaucgaccacgaggacaucaccaaggacaagaccagcaccguggaggccugccugccccuggagcugaccaagaacgagagcugccugaacagcagagagaccagcuucaucaccaacggcagcugccuggccagcagaaagaccagcuucaugauggcccugugccugagcagcaucuacgaggaccugaagauguaccagguggaguucaagaccaugaacgccaagcugcugauggaccccaagagacagaucuuccuggaccagaacaugcuggccgugaucgacgagcugaugcaggcccugaacuucaacagcgagaccgugccccagaagaguagccuggaggagcccgacuucuacaagaccaagaucaagcugugcauccugcugcacgccuucagaaucagagccgugaccaucgacagagugaugagcuaccugaacgccagcugaggacuagugcaucacauuuaaaagcaucucagccuaccaugagaauaagagaaagaaaaugaagaucaauagcuuauucaucucuuuuucuuuuucguugguguaaagccaacacccugucuaaaaaacauaaauuucuuuaaucauuuugccucuuuucucugugcuucaauuaauaaaaaauggaaagaaccuagaucuaaaaaaaaaaaaaaaaaaaaaaaaaaaaaaaaaaaaaaaaaaaaaaaaaaaaaaaaaaaaaaaaugcaucccccccccccccccccccccccccccccccaaaggcucuuuucagagccaccagaauu

SEQ ID NO: 341 - RNA, 1168 nt, Artificial Sequence
  CD40LG mRNA product TOP UTR opt4
ggggcgcugccuacggagguggcagccaucuccuucucggcaucaagcuuaccaugaucgagaccuacaaccagaccagccccagaagcgccgccaccggccugcccaucagcaugaagaucuucauguaccugcugaccguguuccugaucacccagaugaucggcagcgcccuguucgccguguaccugcacagaagacuggacaagaucgaggacgagagaaaccugcacgaggacuucguguucaugaagaccauccagagaugcaacaccggcgagagaagccugagccugcugaacugcgaggagaucaagagccaguucgagggcuucgugaaggacaucaugcugaacaaggaggagaccaagaaggagaacagcuucgagaugcagaagggcgaccagaacccccagaucgccgcccacgugaucagcgaggccagcagcaagaccaccagcgugcugcagugggccgagaagggcuacuacaccaugagcaacaaccuggugacccuggagaacggcaagcagcugaccgugaagagacagggccuguacuacaucuacgcccaggugaccuucugcagcaacagagaggccagcagccaggcccccuucaucgccagccugugccugaagagucccggcagauucgagagaauccugcugagagccgccaacacccacagcagcgccaagcccugcggccagcagagcauccaccugggcggcguguucgagcugcagcccggcgccagcguguucgugaacgugaccgaccccagccaggugagccacggcaccggcuucaccagcuucggccugcugaagcugugaggacuagugcaucacauuuaaaagcaucucagccuaccaugagaauaagagaaagaaaaugaagaucaauagcuuauucaucucuuuuucuuuuucguugguguaaagccaacacccugucuaaaaaacauaaauuucuuuaaucauuuugccucuuuucucugugcuucaauuaauaaaaaauggaaagaaccuagaucuaaaaaaaaaaaaaaaaaaaaaaaaaaaaaaaaaaaaaaaaaaaaaaaaaaaaaaaaaaaaaaaaugcaucccccccccccccccccccccccccccccccaaaggcucuuuucagagccaccagaauu

SEQ ID NO: 342 - RNA, 1249 nt, Artificial Sequence
  PDCD1 mRNA product TOP UTR opt5
ggggcgcugccuacggagguggcagccaucuccuucucggcaucaagcuuaccaugcagaucccccaagccccuuggccgguggucugggcuguucugcagcucggcuggagacccgggugguuccuggacagcccugaucggcccuggaacccucccaccuuuuccccugcccuucugguggugacagagggagacaaugcgacguuuaccugcucuuucagcaacacauccgaaucuuucguccucaauugguaccgcaugagcccguccaaccagaccgauaagcuggcugccuuucccgaggacagaucucagccuggccaagauugucgguuccgcgugacacagcuucccaaugggagagacuuucacaugagcguugugcgggcccgcagaaacgauuccggaaccuaucugugcggcgcuauuagccucgccccuaaagcucagaucaaggaaucucugcgggccgagcugcgcgucacagaaagacgggcggaggugcccaccgcccauccguccccuagcccccgcccugcugggcaguuccaaacgcucguugugggagucgugggcggccugcuugggucucuggugcuccuggucuggguucuugccgugauuuguuccagagcugcccggggaaccaucggcgcgcgcagaacagggcagccccugaaagaggaccccagcgccgugccugucuuuucuguggauuacggagaacucgacuuccaguggcgggagaagaccccggaacccccuguucccugcgugccugagcagacagaguaugcuaccauugucuuucccuccggcauggggacgagcuccccggccagacgcggaucugcugauggcccucggagcgcccaaccccugagaccugaagacggccacuguuccuggccccugugaggacuagugcaucacauuuaaaagcaucucagccuaccaugagaauaagagaaagaaaaugaagaucaauagcuuauucaucucuuuuucuuuuucguugguguaaagccaacacccugucuaaaaaacauaaauuucuuuaaucauuuugccucuuuucucugugcuucaauuaauaaaaaauggaaagaaccuagaucuaaaaaaaaaaaaaaaaaaaaaaaaaaaaaaaaaaaaaaaaaaaaaaaaaaaaaaaaaaaaaaaaugcaucccccccccccccccccccccccccccccccaaaggcucuuuucagagccaccagaauu

SEQ ID NO: 343 - RNA, 832 nt, Artificial Sequence
  PDCD1(1-149) mRNA product TOP UTR opt5
ggggcgcugccuacggagguggcagccaucuccuucucggcaucaagcuuaccaugcagaucccccaagccccuuggccgguggucugggcuguucugcagcucggcuggagacccgggugguuccuggacagcccugaucggcccuggaacccucccaccuuuuccccugcccuucugguggugacagagggagacaaugcgacguuuaccugcucuuucagcaacacauccgaaucuuucguccucaauugguaccgcaugagcccguccaaccagaccgauaagcuggcugccuuucccgaggacagaucucagccuggccaagauugucgguuccgcgugacacagcuucccaaugggagagacuuucacaugagcguugugcgggcccgcagaaacgauuccggaaccuaucugugcggcgcuauuagccucgccccuaaagcucagaucaaggaaucucugcgggccgagcugcgcgucacagaaagacgggcgugaggacuagugcaucacauuuaaaagcaucucagccuaccaugagaauaagagaaagaaaaugaagaucaauagcuuauucaucucuuuuucuuuuucguugguguaaagccaacacccugucuaaaaaacauaaauuucuuuaaucauuuugccucuuuucucugugcuucaauuaauaaaaaauggaaagaaccuagaucuaaaaaaaaaaaaaaaaaaaaaaaaaaaaaaaaaaaaaaaaaaaaaaaaaaaaaaaaaaaaaaaaugcaucccccccccccccccccccccccccccccccaaaggcucuuuucagagccaccagaauu

SEQ ID NO: 344 - RNA, 1042 nt, Artificial Sequence
  IL12A mRNA product TOP UTR opt5
ggggcgcugccuacggagguggcagccaucuccuucucggcaucaagcuuaccaugugccccgccagaagccugcuccugguggcuacccuuguccugcucgaccaccugucccuugcccggaaccugccuguugcgacaccggaucccggcauguucccuugucuccaucacucucagaaucugcugcgcgcugugagcaacaugcuccaaaaggccagacagacgcuggaguuuuaccccugcaccuccgaagagaucgaccaugaagauauuacaaaagacaagaccucuacaguggaggccugucuuccucuggaacucaccaaaaaugagagcugccugaacucccgggagacaucuuucaucaccaaugggagcugucuugcuucccgcaagacgagcuuuaugauggcccugugccucucuuccauuuaugaagaucugaaaauguaccaggucgaguucaagaccaugaacgcuaagcugcucauggaccccaaaagacagaucuuucuggaucaaaauaugcuugccgugauugacgaacugaugcaggcgcucaacuucaauagcgagacaguuccucagaagucuucccuggaggaaccggauuuuuauaaaaccaagaucaaacuuuguauccugcuccacgccuuccggauucgcgcugugacaaucgacagagucaugagcuaccugaacgccucuugaggacuagugcaucacauuuaaaagcaucucagccuaccaugagaauaagagaaagaaaaugaagaucaauagcuuauucaucucuuuuucuuuuucguugguguaaagccaacacccugucuaaaaaacauaaauuucuuuaaucauuuugccucuuuucucugugcuucaauuaauaaaaaauggaaagaaccuagaucuaaaaaaaaaaaaaaaaaaaaaaaaaaaaaaaaaaaaaaaaaaaaaaaaaaaaaaaaaaaaaaaaugcaucccccccccccccccccccccccccccccccaaaggcucuuuucagagccaccagaauu

SEQ ID NO: 345 - RNA, 1039 nt, Artificial Sequence
  IL12A(1-219) mRNA product TOP UTR opt5
ggggcgcugccuacggagguggcagccaucuccuucucggcaucaagcuuaccaugugccccgccagaagccugcuccugguggcuacccuuguccugcucgaccaccugucccuugcccggaaccugccuguugcgacaccggaucccggcauguucccuugucuccaucacucucagaaucugcugcgcgcugugagcaacaugcuccaaaaggccagacagacgcuggaguuuuaccccugcaccuccgaagagaucgaccaugaagauauuacaaaagacaagaccucuacaguggaggccugucuuccucuggaacucaccaaaaaugagagcugccugaacucccgggagacaucuuucaucaccaaugggagcugucuugcuucccgcaagacgagcuuuaugauggcccugugccucucuuccauuuaugaagaucugaaaauguaccaggucgaguucaagaccaugaacgcuaagcugcucauggaccccaaaagacagaucuuucuggaucaaaauaugcuugccgugauugacgaacugaugcaggcgcucaacuucaauagcgagacaguuccucagaagucuucccuggaggaaccggauuuuuauaaaaccaagaucaaacuuuguauccugcuccacgccuuccggauucgcgcugugacaaucgacagagucaugagcuaccugaacgccucuggacuagugcaucacauuuaaaagcaucucagccuaccaugagaauaagagaaagaaaaugaagaucaauagcuuauucaucucuuuuucuuuuucguugguguaaagccaacacccugucuaaaaaacauaaauuucuuuaaucauuuugccucuuuucucugugcuucaauuaauaaaaaauggaaagaaccuagaucuaaaaaaaaaaaaaaaaaaaaaaaaaaaaaaaaaaaaaaaaaaaaaaaaaaaaaaaaaaaaaaaaugcaucccccccccccccccccccccccccccccccaaaggcucuuuucagagccaccagaauu

SEQ ID NO: 346 - RNA, 976 nt, Artificial Sequence
  IL12A(23-219) mRNA product TOP UTR opt5
ggggcgcugccuacggagguggcagccaucuccuucucggcaucaagcuuacccggaaccugccuguugcgacaccggaucccggcauguucccuugucuccaucacucucagaaucugcugcgcgcugugagcaacaugcuccaaaaggccagacagacgcuggaguuuuaccccugcaccuccgaagagaucgaccaugaagauauuacaaaagacaagaccucuacaguggaggccugucuuccucuggaacucaccaaaaaugagagcugccugaacucccgggagacaucuuucaucaccaaugggagcugucuugcuucccgcaagacgagcuuuaugauggcccugugccucucuuccauuuaugaagaucugaaaauguaccaggucgaguucaagaccaugaacgcuaagcugcucauggaccccaaaagacagaucuuucuggaucaaaauaugcuugccgugauugacgaacugaugcaggcgcucaacuucaauagcgagacaguuccucagaagucuucccuggaggaaccggauuuuuauaaaaccaagaucaaacuuuguauccugcuccacgccuuccggauucgcgcugugacaaucgacagagucaugagcuaccugaacgccucuugaggacuagugcaucacauuuaaaagcaucucagccuaccaugagaauaagagaaagaaaaugaagaucaauagcuuauucaucucuuuuucuuuuucguugguguaaagccaacacccugucuaaaaaacauaaauuucuuuaaucauuuugccucuuuucucugugcuucaauuaauaaaaaauggaaagaaccuagaucuaaaaaaaaaaaaaaaaaaaaaaaaaaaaaaaaaaaaaaaaaaaaaaaaaaaaaaaaaaaaaaaaugcaucccccccccccccccccccccccccccccccaaaggcucuuuucagagccaccagaauu

SEQ ID NO: 347 - RNA, 1369 nt, Artificial Sequence
  IL12B mRNA product TOP UTR opt5
ggggcgcugccuacggagguggcagccaucuccuucucggcaucaagcuuaccaugugccaccagcaacuggugaucagcugguucucccucgucuuucuggccucuccccuuguugcuauuugggagcugaagaaagacguguacguggucgaacucgauugguauccugacgccccgggcgagauggugguucugaccugugauacacccgaagaggacgggaucacguggacccuugaucagagcuccgaagugcugggaucuggcaagacacucaccauucaggucaaagaguucggggacgcgggacaguacacaugccauaagggcggggaggugcugagccacucccugcuccugcuucauaaaaaggaagauggaaucuggucuaccgacauucugaaggaucaaaaagagccuaagaacaaaacauuucucagaugugaagcuaagaauuauagcggccgguuuaccugcugguggcugacgaccaucuccacagaccuuaccuucagcguuaaaucuucccgcggcagcucugauccccagggggugacauguggagccgccacccuguccgcugagagaguccggggcgacaacaaggaguacgaauauagcguggagugccaggaagauucugccuguccugcugccgaggaaucccuccccaucgaggugauggucgacgcgguucacaagcugaaauacgagaauuauacgagcuccuucuuuauucgcgacaucauuaagccugauccgcccaaaaaccugcagcucaagccucugaaaaauucuagacaaguggaagugagcugggaguaccccgacacaugguccaccccucauagcuacuucucucuuacauuuugcguccaggugcaggggaaguccaaacgggaaaagaaggaucgcguuuucaccgacaaaaccagcgccacagugaucuguagaaagaacgcuucuauuagcguccgggcccaggaucgcuauuacuccucuagcugguccgagugggcuagcgugcccugcucuugaggacuagugcaucacauuuaaaagcaucucagccuaccaugagaauaagagaaagaaaaugaagaucaauagcuuauucaucucuuuuucuuuuucguugguguaaagccaacacccugucuaaaaaacauaaauuucuuuaaucauuuugccucuuuucucugugcuucaauuaauaaaaaauggaaagaaccuagaucuaaaaaaaaaaaaaaaaaaaaaaaaaaaaaaaaaaaaaaaaaaaaaaaaaaaaaaaaaaaaaaaaugcaucccccccccccccccccccccccccccccccaaaggcucuuuucagagccaccagaauu

SEQ ID NO: 348 - RNA, 1366 nt, Artificial Sequence
  IL12B(1-328) mRNA product TOP UTR opt5
ggggcgcugccuacggagguggcagccaucuccuucucggcaucaagcuuaccaugugccaccagcaacuggugaucagcugguucucccucgucuuucuggccucuccccuuguugcuauuugggagcugaagaaagacguguacguggucgaacucgauugguauccugacgccccgggcgagauggugguucugaccugugauacacccgaagaggacgggaucacguggacccuugaucagagcuccgaagugcugggaucuggcaagacacucaccauucaggucaaagaguucggggacgcgggacaguacacaugccauaagggcggggaggugcugagccacucccugcuccugcuucauaaaaaggaagauggaaucuggucuaccgacauucugaaggaucaaaaagagccuaagaacaaaacauuucucagaugugaagcuaagaauuauagcggccgguuuaccugcugguggcugacgaccaucuccacagaccuuaccuucagcguuaaaucuucccgcggcagcucugauccccagggggugacauguggagccgccacccuguccgcugagagaguccggggcgacaacaaggaguacgaauauagcguggagugccaggaagauucugccuguccugcugccgaggaaucccuccccaucgaggugauggucgacgcgguucacaagcugaaauacgagaauuauacgagcuccuucuuuauucgcgacaucauuaagccugauccgcccaaaaaccugcagcucaagccucugaaaaauucuagacaaguggaagugagcugggaguaccccgacacaugguccaccccucauagcuacuucucucuuacauuuugcguccaggugcaggggaaguccaaacgggaaaagaaggaucgcguuuucaccgacaaaaccagcgccacagugaucuguagaaagaacgcuucuauuagcguccgggcccaggaucgcuauuacuccucuagcugguccgagugggcuagcgugcccugcucuggacuagugcaucacauuuaaaagcaucucagccuaccaugagaauaagagaaagaaaaugaagaucaauagcuuauucaucucuuuuucuuuuucguugguguaaagccaacacccugucuaaaaaacauaaauuucuuuaaucauuuugccucuuuucucugugcuucaauuaauaaaaaauggaaagaaccuagaucuaaaaaaaaaaaaaaaaaaaaaaaaaaaaaaaaaaaaaaaaaaaaaaaaaaaaaaaaaaaaaaaaugcaucccccccccccccccccccccccccccccccaaaggcucuuuucagagccaccagaauu

SEQ ID NO: 349 - RNA, 1303 nt, Artificial Sequence
  IL12B(23-328) mRNA product TOP UTR opt5
ggggcgcugccuacggagguggcagccaucuccuucucggcaucaagcuuaccauuugggagcugaagaaagacguguacguggucgaacucgauugguauccugacgccccgggcgagauggugguucugaccugugauacacccgaagaggacgggaucacguggacccuugaucagagcuccgaagugcugggaucuggcaagacacucaccauucaggucaaagaguucggggacgcgggacaguacacaugccauaagggcggggaggugcugagccacucccugcuccugcuucauaaaaaggaagauggaaucuggucuaccgacauucugaaggaucaaaaagagccuaagaacaaaacauuucucagaugugaagcuaagaauuauagcggccgguuuaccugcugguggcugacgaccaucuccacagaccuuaccuucagcguuaaaucuucccgcggcagcucugauccccagggggugacauguggagccgccacccuguccgcugagagaguccggggcgacaacaaggaguacgaauauagcguggagugccaggaagauucugccuguccugcugccgaggaaucccuccccaucgaggugauggucgacgcgguucacaagcugaaauacgagaauuauacgagcuccuucuuuauucgcgacaucauuaagccugauccgcccaaaaaccugcagcucaagccucugaaaaauucuagacaaguggaagugagcugggaguaccccgacacaugguccaccccucauagcuacuucucucuuacauuuugcguccaggugcaggggaaguccaaacgggaaaagaaggaucgcguuuucaccgacaaaaccagcgccacagugaucuguagaaagaacgcuucuauuagcguccgggcccaggaucgcuauuacuccucuagcugguccgagugggcuagcgugcccugcucuugaggacuagugcaucacauuuaaaagcaucucagccuaccaugagaauaagagaaagaaaaugaagaucaauagcuuauucaucucuuuuucuuuuucguugguguaaagccaacacccugucuaaaaaacauaaauuucuuuaaucauuuugccucuuuucucugugcuucaauuaauaaaaaauggaaagaaccuagaucuaaaaaaaaaaaaaaaaaaaaaaaaaaaaaaaaaaaaaaaaaaaaaaaaaaaaaaaaaaaaaaaaugcaucccccccccccccccccccccccccccccccaaaggcucuuuucagagccaccagaauu

SEQ ID NO: 350 - RNA, 436 nt, Artificial Sequence
  Linker-sFvCC49-218 mRNA product TOP UTR opt5
ggggcgcugccuacggagguggcagccaucuccuucucggcaucaagcuuaccggcagcaccuccgggucuggaaagcccggcagcggggagggauccacaaaaggcggacuagugcaucacauuuaaaagcaucucagccuaccaugagaauaagagaaagaaaaugaagaucaauagcuuauucaucucuuuuucuuuuucguugguguaaagccaacacccugucuaaaaaacauaaauuucuuuaaucauuuugccucuuuucucugugcuucaauuaauaaaaaauggaaagaaccuagaucuaaaaaaaaaaaaaaaaaaaaaaaaaaaaaaaaaaaaaaaaaaaaaaaaaaaaaaaaaaaaaaaaugcaucccccccccccccccccccccccccccccccaaaggcucuuuucagagccaccagaauu

SEQ ID NO: 351 - RNA, 2014 nt, Artificial Sequence
  IL12 mRNA product TOP UTR opt5
ggggcgcugccuacggagguggcagccaucuccuucucggcaucaagcuuaccaugugccaccagcaacuggugaucagcugguucucccucgucuuucuggccucuccccuuguugcuauuugggagcugaagaaagacguguacguggucgaacucgauugguauccugacgccccgggcgagauggugguucugaccugugauacacccgaagaggacgggaucacguggacccuugaucagagcuccgaagugcugggaucuggcaagacacucaccauucaggucaaagaguucggggacgcgggacaguacacaugccauaagggcggggaggugcugagccacucccugcuccugcuucauaaaaaggaagauggaaucuggucuaccgacauucugaaggaucaaaaagagccuaagaacaaaacauuucucagaugugaagcuaagaauuauagcggccgguuuaccugcugguggcugacgaccaucuccacagaccuuaccuucagcguuaaaucuucccgcggcagcucugauccccagggggugacauguggagccgccacccuguccgcugagagaguccggggcgacaacaaggaguacgaauauagcguggagugccaggaagauucugccuguccugcugccgaggaaucccuccccaucgaggugauggucgacgcgguucacaagcugaaauacgagaauuauacgagcuccuucuuuauucgcgacaucauuaagccugauccgcccaaaaaccugcagcucaagccucugaaaaauucuagacaaguggaagugagcugggaguaccccgacacaugguccaccccucauagcuacuucucucuuacauuuugcguccaggugcaggggaaguccaaacgggaaaagaaggaucgcguuuucaccgacaaaaccagcgccacagugaucuguagaaagaacgcuucuauuagcguccgggcccaggaucgcuauuacuccucuagcugguccgagugggcuagcgugcccugcucuggcagcaccuccgggucuggaaagcccggcagcggggagggauccacaaaaggccggaaccugccuguugcgacaccggaucccggcauguucccuugucuccaucacucucagaaucugcugcgcgcugugagcaacaugcuccaaaaggccagacagacgcuggaguuuuaccccugcaccuccgaagagaucgaccaugaagauauuacaaaagacaagaccucuacaguggaggccugucuuccucuggaacucaccaaaaaugagagcugccugaacucccgggagacaucuuucaucaccaaugggagcugucuugcuucccgcaagacgagcuuuaugauggcccugugccucucuuccauuuaugaagaucugaaaauguaccaggucgaguucaagaccaugaacgcuaagcugcucauggaccccaaaagacagaucuuucuggaucaaaauaugcuugccgugauugacgaacugaugcaggcgcucaacuucaauagcgagacaguuccucagaagucuucccuggaggaaccggauuuuuauaaaaccaagaucaaacuuuguauccugcuccacgccuuccggauucgcgcugugacaaucgacagagucaugagcuaccugaacgccucuugaggacuagugcaucacauuuaaaagcaucucagccuaccaugagaauaagagaaagaaaaugaagaucaauagcuuauucaucucuuuuucuuuuucguugguguaaagccaacacccugucuaaaaaacauaaauuucuuuaaucauuuugccucuuuucucugugcuucaauuaauaaaaaauggaaagaaccuagaucuaaaaaaaaaaaaaaaaaaaaaaaaaaaaaaaaaaaaaaaaaaaaaaaaaaaaaaaaaaaaaaaaugcaucccccccccccccccccccccccccccccccaaaggcucuuuucagagccaccagaauu

SEQ ID NO: 352 - RNA, 1168 nt, Artificial Sequence
  CD40LG mRNA product TOP UTR opt5
ggggcgcugccuacggagguggcagccaucuccuucucggcaucaagcuuaccaugaucgagaccuacaaccagacaagccccagauccgccgcuacgggccugccuauuucuaugaagaucuucauguaucuccugaccguguuucuuauuacacaaaugaucgggagcgcccuguucgcggucuaccuccaccggcgccuggacaaaauugaagaugagagaaaucuucaugaagacuuuguuuucaugaagaccauccagcggugcaacacaggagagcgcucccugucucuccugaauugugaagagaucaaaagccaguuugagggcuucgugaaggauauuaugcugaacaaagaagagaccaagaaggaaaauuccuuugagaugcagaaaggggaccaaaacccgcagaucgcugcccacgugauuucugaggccagcuccaagacaaccagcguccuccagugggcugaaaaaggauauuacacgaugucuaauaaccuggugacccuugagaauggcaagcagcugacaguuaaaagacaagggcucuauuacaucuaugcccaggugaccuucugcuccaaccgggaagcuagcucucaggcccccuuuauugcgucccugugucuuaagagcccuggacgcuucgagagaauccugcuccgggccgcuaauacacauucuuccgccaagcccugcggccagcaaagcauucaccugggcggggucuuugaacugcagccuggagcuuccguguucguuaacgugaccgaucccucucaggucagccauggcacgggguuuacauccuucggacuccugaaacuuugaggacuagugcaucacauuuaaaagcaucucagccuaccaugagaauaagagaaagaaaaugaagaucaauagcuuauucaucucuuuuucuuuuucguugguguaaagccaacacccugucuaaaaaacauaaauuucuuuaaucauuuugccucuuuucucugugcuucaauuaauaaaaaauggaaagaaccuagaucuaaaaaaaaaaaaaaaaaaaaaaaaaaaaaaaaaaaaaaaaaaaaaaaaaaaaaaaaaaaaaaaaugcaucccccccccccccccccccccccccccccccaaaggcucuuuucagagccaccagaauu

SEQ ID NO: 353 - RNA, 1249 nt, Artificial Sequence
  PDCD1 mRNA product TOP UTR opt6
ggggcgcugccuacggagguggcagccaucuccuucucggcaucaagcuuaccaugcaaauaccacaagcaccauggccaguaguaugggcuguacuacaauuagguuggcgaccaggaugguuuuuagacucaccagaucguccauggaacccaccaacauuuucaccagcauuauuaguaguaacagaaggagauaaugcaaccuuuacauguucauucaguaacacaucagaaaguuuuguacuaaauugguauagaaugucaccuucaaaucaaacagauaaauuagcagcauuuccagaagauagaucacaaccaggacaagauugcagauuuagaguaacacaauuaccuaauggacgagacuuucauaugucaguaguaagagcucgacguaacgauucaggaacauacuuauguggagcaauaucauuagcaccaaaagcacaaauaaaagaaucuuuaagagcagaauuaagaguaacagaaagacgcgcagaaguaccaacagcacauccaagcccuucaccacgaccugcaggacaauuucaaacauuaguagucggaguaguaggaggauuauuagguucacugguauuauuaguauggguauuagcaguaauaugcuccagagcagcaagaggaacaauaggagcaagaagaacaggacaaccauuaaaagaagacccaucugcaguaccaguauuuucaguugacuauggagaacuagauuuccaauggagggaaaaaacaccagaaccuccaguuccauguguaccagaacaaacagaauaugcaacaauuguauuucccucaggaaugggaacaucuaguccagcaagaagaggaucagcugauggaccaagaucagcacaaccauuaagaccagaagauggacauuguucauggccauuauaaggacuagugcaucacauuuaaaagcaucucagccuaccaugagaauaagagaaagaaaaugaagaucaauagcuuauucaucucuuuuucuuuuucguugguguaaagccaacacccugucuaaaaaacauaaauuucuuuaaucauuuugccucuuuucucugugcuucaauuaauaaaaaauggaaagaaccuagaucuaaaaaaaaaaaaaaaaaaaaaaaaaaaaaaaaaaaaaaaaaaaaaaaaaaaaaaaaaaaaaaaaugcaucccccccccccccccccccccccccccccccaaaggcucuuuucagagccaccagaauu

SEQ ID NO: 354 - RNA, 832 nt, Artificial Sequence
  PDCD1(1-149) mRNA product TOP UTR opt6
ggggcgcugccuacggagguggcagccaucuccuucucggcaucaagcuuaccaugcaaauaccacaagcaccauggccaguaguaugggcuguacuacaauuagguuggcgaccaggaugguuuuuagacucaccagaucguccauggaacccaccaacauuuucaccagcauuauuaguaguaacagaaggagauaaugcaaccuuuacauguucauucaguaacacaucagaaaguuuuguacuaaauugguauagaaugucaccuucaaaucaaacagauaaauuagcagcauuuccagaagauagaucacaaccaggacaagauugcagauuuagaguaacacaauuaccuaauggacgagacuuucauaugucaguaguaagagcucgacguaacgauucaggaacauacuuauguggagcaauaucauuagcaccaaaagcacaaauaaaagaaucuuuaagagcagaauuaagaguaacagaaagacgcgcauaaggacuagugcaucacauuuaaaagcaucucagccuaccaugagaauaagagaaagaaaaugaagaucaauagcuuauucaucucuuuuucuuuuucguugguguaaagccaacacccugucuaaaaaacauaaauuucuuuaaucauuuugccucuuuucucugugcuucaauuaauaaaaaauggaaagaaccuagaucuaaaaaaaaaaaaaaaaaaaaaaaaaaaaaaaaaaaaaaaaaaaaaaaaaaaaaaaaaaaaaaaaugcaucccccccccccccccccccccccccccccccaaaggcucuuuucagagccaccagaauu

SEQ ID NO: 355 - RNA, 1042 nt, Artificial Sequence
  IL12A mRNA product TOP UTR opt6
ggggcgcugccuacggagguggcagccaucuccuucucggcaucaagcuuaccaugugcccagcaagaucacuacuacugguagcaacacugguacuacuagaccaccuaucacucgccagaaaccucccaguagccacaccagacccaggaauguuccccugccuccaccauucccaaaaccuacuaagagcaguaucaaacaugcuacaaaaagcaagacaaacacuagaguucuauccaugcacaucagaagaaauagaccacgaagacauaacaaaagacaaaacaucaaccguagaagcaugccucccacucgaacucacaaaaaacgaaucaugccuaaacucaagagaaacaucauucauaacaaacggcucaugcuuagccucaagaaaaacaucauucaugauggcacuaugccucucauccauauaugaagacuuaaaaauguaccaaguagaauuuaaaaccaugaacgcaaaauuacuaauggacccaaaaagacaaauauuccuagaccaaaacaugcuagcaguaauagacgaacuaaugcaagcacuaaacuucaacucagaaaccguaccccaaaaaucaucucuagaagaaccagacuucuacaaaacaaaaauaaaacuaugcauacuacuacacgccuucagaauaagagccgucacaauagacagagucaugucauaccuaaacgccucauaaggacuagugcaucacauuuaaaagcaucucagccuaccaugagaauaagagaaagaaaaugaagaucaauagcuuauucaucucuuuuucuuuuucguugguguaaagccaacacccugucuaaaaaacauaaauuucuuuaaucauuuugccucuuuucucugugcuucaauuaauaaaaaauggaaagaaccuagaucuaaaaaaaaaaaaaaaaaaaaaaaaaaaaaaaaaaaaaaaaaaaaaaaaaaaaaaaaaaaaaaaaugcaucccccccccccccccccccccccccccccccaaaggcucuuuucagagccaccagaauu

SEQ ID NO: 356 - RNA, 1039 nt, Artificial Sequence
  IL12A(1-219) mRNA product TOP UTR opt6
ggggcgcugccuacggagguggcagccaucuccuucucggcaucaagcuuaccaugugcccagcaagaucacuacuacugguagcaacacugguacuacuagaccaccuaucacucgccagaaaccucccaguagccacaccagacccaggaauguuccccugccuccaccauucccaaaaccuacuaagagcaguaucaaacaugcuacaaaaagcaagacaaacacuagaguucuauccaugcacaucagaagaaauagaccacgaagacauaacaaaagacaaaacaucaaccguagaagcaugccucccacucgaacucacaaaaaacgaaucaugccuaaacucaagagaaacaucauucauaacaaacggcucaugcuuagccucaagaaaaacaucauucaugauggcacuaugccucucauccauauaugaagacuuaaaaauguaccaaguagaauuuaaaaccaugaacgcaaaauuacuaauggacccaaaaagacaaauauuccuagaccaaaacaugcuagcaguaauagacgaacuaaugcaagcacuaaacuucaacucagaaaccguaccccaaaaaucaucucuagaagaaccagacuucuacaaaacaaaaauaaaacuaugcauacuacuacacgccuucagaauaagagccgucacaauagacagagucaugucauaccuaaacgccucaggacuagugcaucacauuuaaaagcaucucagccuaccaugagaauaagagaaagaaaaugaagaucaauagcuuauucaucucuuuuucuuuuucguugguguaaagccaacacccugucuaaaaaacauaaauuucuuuaaucauuuugccucuuuucucugugcuucaauuaauaaaaaauggaaagaaccuagaucuaaaaaaaaaaaaaaaaaaaaaaaaaaaaaaaaaaaaaaaaaaaaaaaaaaaaaaaaaaaaaaaaugcaucccccccccccccccccccccccccccccccaaaggcucuuuucagagccaccagaauu

SEQ ID NO: 357 - RNA, 976 nt, Artificial Sequence
  IL12A(23-219) mRNA product TOP UTR opt6
ggggcgcugccuacggagguggcagccaucuccuucucggcaucaagcuuaccagaaaccucccaguagccacaccagacccaggaauguuccccugccuccaccauucccaaaaccuacuaagagcaguaucaaacaugcuacaaaaagcaagacaaacacuagaguucuauccaugcacaucagaagaaauagaccacgaagacauaacaaaagacaaaacaucaaccguagaagcaugccucccacucgaacucacaaaaaacgaaucaugccuaaacucaagagaaacaucauucauaacaaacggcucaugcuuagccucaagaaaaacaucauucaugauggcacuaugccucucauccauauaugaagacuuaaaaauguaccaaguagaauuuaaaaccaugaacgcaaaauuacuaauggacccaaaaagacaaauauuccuagaccaaaacaugcuagcaguaauagacgaacuaaugcaagcacuaaacuucaacucagaaaccguaccccaaaaaucaucucuagaagaaccagacuucuacaaaacaaaaauaaaacuaugcauacuacuacacgccuucagaauaagagccgucacaauagacagagucaugucauaccuaaacgccucauaaggacuagugcaucacauuuaaaagcaucucagccuaccaugagaauaagagaaagaaaaugaagaucaauagcuuauucaucucuuuuucuuuuucguugguguaaagccaacacccugucuaaaaaacauaaauuucuuuaaucauuuugccucuuuucucugugcuucaauuaauaaaaaauggaaagaaccuagaucuaaaaaaaaaaaaaaaaaaaaaaaaaaaaaaaaaaaaaaaaaaaaaaaaaaaaaaaaaaaaaaaaugcaucccccccccccccccccccccccccccccccaaaggcucuuuucagagccaccagaauu

SEQ ID NO: 358 - RNA, 1369 nt, Artificial Sequence
  IL12B mRNA product TOP UTR opt6
ggggcgcugccuacggagguggcagccaucuccuucucggcaucaagcuuaccaugugccaccaacaacugguaauaucaugguucucacugguauucuuggcaucaccccuaguagcaauaugggaacuaaaaaaagacguauacguaguagaacuagacugguacccagacgcaccaggagaaaugguaguauuaacaugcgacacaccagaagaagauggaauaacuuggacauuagaccaaucaagugaaguauuaggaucaggcaaaacacuaacuauacaaguaaaagaauuuggagacgcaggacaauacacgugccacaaaggaggcgaaguccuaucacauucacuacuauuauuacacaaaaaagaagacggaaucuggagcacagacauauuaaaagaccaaaaagaaccaaaaaacaaaacauuucuaagaugcgaagcuaaaaacuauucaggaagauucacaugcugguggcuaacaaccaucaguaccgacuuaacauucucaguaaaaucaucaagaggaucaucagacccacaaggaguaacauguggagcagcaacacuaagcgcagaaagaguacgaggagacaacaaagaauacgaauauucaguagaaugucaagaagacucagcaugcccugcagcagaagaaucauuaccaauagaaguaauggucgacgcuguacacaaacuaaaauaugaaaauuacacaagcaguuucuucauaagagacauaauaaaacccgacccaccaaaaaaccuacaacuaaaaccauuaaaaaauucaagacaaguagaaguaucaugggaauacccagauacauggagcacaccacacaguuacuucucauuaacauucugcguacaaguacaaggaaaaaguaaaagagaaaaaaaagacagaguauucacagauaagacuucagcaacaguaauaugcagaaaaaacgcaagcauaagcguacgagcacaagacagauauuacucaagcucauggucagaaugggcaucaguaccauguucauaaggacuagugcaucacauuuaaaagcaucucagccuaccaugagaauaagagaaagaaaaugaagaucaauagcuuauucaucucuuuuucuuuuucguugguguaaagccaacacccugucuaaaaaacauaaauuucuuuaaucauuuugccucuuuucucugugcuucaauuaauaaaaaauggaaagaaccuagaucuaaaaaaaaaaaaaaaaaaaaaaaaaaaaaaaaaaaaaaaaaaaaaaaaaaaaaaaaaaaaaaaaugcaucccccccccccccccccccccccccccccccaaaggcucuuuucagagccaccagaauu

SEQ ID NO: 359 - RNA, 1366 nt, Artificial Sequence
  IL12B(1-328) mRNA product TOP UTR opt6
ggggcgcugccuacggagguggcagccaucuccuucucggcaucaagcuuaccaugugccaccaacaacugguaauaucaugguucucacugguauucuuggcaucaccccuaguagcaauaugggaacuaaaaaaagacguauacguaguagaacuagacugguacccagacgcaccaggagaaaugguaguauuaacaugcgacacaccagaagaagauggaauaacuuggacauuagaccaaucaagugaaguauuaggaucaggcaaaacacuaacuauacaaguaaaagaauuuggagacgcaggacaauacacgugccacaaaggaggcgaaguccuaucacauucacuacuauuauuacacaaaaaagaagacggaaucuggagcacagacauauuaaaagaccaaaaagaaccaaaaaacaaaacauuucuaagaugcgaagcuaaaaacuauucaggaagauucacaugcugguggcuaacaaccaucaguaccgacuuaacauucucaguaaaaucaucaagaggaucaucagacccacaaggaguaacauguggagcagcaacacuaagcgcagaaagaguacgaggagacaacaaagaauacgaauauucaguagaaugucaagaagacucagcaugcccugcagcagaagaaucauuaccaauagaaguaauggucgacgcuguacacaaacuaaaauaugaaaauuacacaagcaguuucuucauaagagacauaauaaaacccgacccaccaaaaaaccuacaacuaaaaccauuaaaaaauucaagacaaguagaaguaucaugggaauacccagauacauggagcacaccacacaguuacuucucauuaacauucugcguacaaguacaaggaaaaaguaaaagagaaaaaaaagacagaguauucacagauaagacuucagcaacaguaauaugcagaaaaaacgcaagcauaagcguacgagcacaagacagauauuacucaagcucauggucagaaugggcaucaguaccauguucaggacuagugcaucacauuuaaaagcaucucagccuaccaugagaauaagagaaagaaaaugaagaucaauagcuuauucaucucuuuuucuuuuucguugguguaaagccaacacccugucuaaaaaacauaaauuucuuuaaucauuuugccucuuuucucugugcuucaauuaauaaaaaauggaaagaaccuagaucuaaaaaaaaaaaaaaaaaaaaaaaaaaaaaaaaaaaaaaaaaaaaaaaaaaaaaaaaaaaaaaaaugcaucccccccccccccccccccccccccccccccaaaggcucuuuucagagccaccagaauu

SEQ ID NO: 360 - RNA, 1303 nt, Artificial Sequence
  IL12B(23-328) mRNA product TOP UTR opt6
ggggcgcugccuacggagguggcagccaucuccuucucggcaucaagcuuaccauaugggaacuaaaaaaagacguauacguaguagaacuagacugguacccagacgcaccaggagaaaugguaguauuaacaugcgacacaccagaagaagauggaauaacuuggacauuagaccaaucaagugaaguauuaggaucaggcaaaacacuaacuauacaaguaaaagaauuuggagacgcaggacaauacacgugccacaaaggaggcgaaguccuaucacauucacuacuauuauuacacaaaaaagaagacggaaucuggagcacagacauauuaaaagaccaaaaagaaccaaaaaacaaaacauuucuaagaugcgaagcuaaaaacuauucaggaagauucacaugcugguggcuaacaaccaucaguaccgacuuaacauucucaguaaaaucaucaagaggaucaucagacccacaaggaguaacauguggagcagcaacacuaagcgcagaaagaguacgaggagacaacaaagaauacgaauauucaguagaaugucaagaagacucagcaugcccugcagcagaagaaucauuaccaauagaaguaauggucgacgcuguacacaaacuaaaauaugaaaauuacacaagcaguuucuucauaagagacauaauaaaacccgacccaccaaaaaaccuacaacuaaaaccauuaaaaaauucaagacaaguagaaguaucaugggaauacccagauacauggagcacaccacacaguuacuucucauuaacauucugcguacaaguacaaggaaaaaguaaaagagaaaaaaaagacagaguauucacagauaagacuucagcaacaguaauaugcagaaaaaacgcaagcauaagcguacgagcacaagacagauauuacucaagcucauggucagaaugggcaucaguaccauguucauaaggacuagugcaucacauuuaaaagcaucucagccuaccaugagaauaagagaaagaaaaugaagaucaauagcuuauucaucucuuuuucuuuuucguugguguaaagccaacacccugucuaaaaaacauaaauuucuuuaaucauuuugccucuuuucucugugcuucaauuaauaaaaaauggaaagaaccuagaucuaaaaaaaaaaaaaaaaaaaaaaaaaaaaaaaaaaaaaaaaaaaaaaaaaaaaaaaaaaaaaaaaugcaucccccccccccccccccccccccccccccccaaaggcucuuuucagagccaccagaauu

SEQ ID NO: 361 - RNA, 436 nt, Artificial Sequence
  Linker-sFvCC49-218 mRNA product TOP UTR opt6
ggggcgcugccuacggagguggcagccaucuccuucucggcaucaagcuuaccggaaguacaaguggaaguggaaaaccaggaaguggagaaggaaguacaaaaggaggacuagugcaucacauuuaaaagcaucucagccuaccaugagaauaagagaaagaaaaugaagaucaauagcuuauucaucucuuuuucuuuuucguugguguaaagccaacacccugucuaaaaaacauaaauuucuuuaaucauuuugccucuuuucucugugcuucaauuaauaaaaaauggaaagaaccuagaucuaaaaaaaaaaaaaaaaaaaaaaaaaaaaaaaaaaaaaaaaaaaaaaaaaaaaaaaaaaaaaaaaugcaucccccccccccccccccccccccccccccccaaaggcucuuuucagagccaccagaauu

SEQ ID NO: 362 - RNA, 2014 nt, Artificial Sequence
  IL12 mRNA product TOP UTR opt6
ggggcgcugccuacggagguggcagccaucuccuucucggcaucaagcuuaccaugugccaccaacaacugguaauaucaugguucucacugguauucuuggcaucaccccuaguagcaauaugggaacuaaaaaaagacguauacguaguagaacuagacugguacccagacgcaccaggagaaaugguaguauuaacaugcgacacaccagaagaagauggaauaacuuggacauuagaccaaucaagugaaguauuaggaucaggcaaaacacuaacuauacaaguaaaagaauuuggagacgcaggacaauacacgugccacaaaggaggcgaaguccuaucacauucacuacuauuauuacacaaaaaagaagacggaaucuggagcacagacauauuaaaagaccaaaaagaaccaaaaaacaaaacauuucuaagaugcgaagcuaaaaacuauucaggaagauucacaugcugguggcuaacaaccaucaguaccgacuuaacauucucaguaaaaucaucaagaggaucaucagacccacaaggaguaacauguggagcagcaacacuaagcgcagaaagaguacgaggagacaacaaagaauacgaauauucaguagaaugucaagaagacucagcaugcccugcagcagaagaaucauuaccaauagaaguaauggucgacgcuguacacaaacuaaaauaugaaaauuacacaagcaguuucuucauaagagacauaauaaaacccgacccaccaaaaaaccuacaacuaaaaccauuaaaaaauucaagacaaguagaaguaucaugggaauacccagauacauggagcacaccacacaguuacuucucauuaacauucugcguacaaguacaaggaaaaaguaaaagagaaaaaaaagacagaguauucacagauaagacuucagcaacaguaauaugcagaaaaaacgcaagcauaagcguacgagcacaagacagauauuacucaagcucauggucagaaugggcaucaguaccauguucaggaaguacaaguggaaguggaaaaccaggaaguggagaaggaaguacaaaaggaagaaaccucccaguagccacaccagacccaggaauguuccccugccuccaccauucccaaaaccuacuaagagcaguaucaaacaugcuacaaaaagcaagacaaacacuagaguucuauccaugcacaucagaagaaauagaccacgaagacauaacaaaagacaaaacaucaaccguagaagcaugccucccacucgaacucacaaaaaacgaaucaugccuaaacucaagagaaacaucauucauaacaaacggcucaugcuuagccucaagaaaaacaucauucaugauggcacuaugccucucauccauauaugaagacuuaaaaauguaccaaguagaauuuaaaaccaugaacgcaaaauuacuaauggacccaaaaagacaaauauuccuagaccaaaacaugcuagcaguaauagacgaacuaaugcaagcacuaaacuucaacucagaaaccguaccccaaaaaucaucucuagaagaaccagacuucuacaaaacaaaaauaaaacuaugcauacuacuacacgccuucagaauaagagccgucacaauagacagagucaugucauaccuaaacgccucauaaggacuagugcaucacauuuaaaagcaucucagccuaccaugagaauaagagaaagaaaaugaagaucaauagcuuauucaucucuuuuucuuuuucguugguguaaagccaacacccugucuaaaaaacauaaauuucuuuaaucauuuugccucuuuucucugugcuucaauuaauaaaaaauggaaagaaccuagaucuaaaaaaaaaaaaaaaaaaaaaaaaaaaaaaaaaaaaaaaaaaaaaaaaaaaaaaaaaaaaaaaaugcaucccccccccccccccccccccccccccccccaaaggcucuuuucagagccaccagaauu

SEQ ID NO: 363 - RNA, 1168 nt, Artificial Sequence
  CD40LG mRNA product TOP UTR opt6
ggggcgcugccuacggagguggcagccaucuccuucucggcaucaagcuuaccaugauagaaacauauaaucaaacaagcccaagaucagcagcaacaggacuaccaauaucaaugaaaauauucauguaccuacucacagucuuccuaauaacacaaaugauaggaucugcccuauuugcaguauaccuacacagaagacuagauaaaauagaagacgaaagaaaccuacaugaagacuucguauucaugaaaacaauacaaagaugcaacaccggagaaagaucccuaucacuacuaaacugcgaagaaauaaaaucacaauucgaaggauucguaaaagacauaaugcuaaacaaagaagaaacaaaaaaagaaaacucuuucgaaaugcaaaaaggagaccaaaacccacaaauagcugcacacgucauaucagaagcaucaucaaaaacaacaucaguacuucaaugggcagaaaaaggauacuauacaaugucaaacaaucuaguaacccuagaaaacggaaaacaacuaacaguaaaaagacaaggacuauacuauauauacgcacaaguaacauucugcucaaacagagaagcaucaucacaagcaccauucaucgcaucacuaugccuaaaauccccaggaagauucgaacgaauccuacuaagagcagcaaacacacacucaucagcaaaaccaugcggccaacaaucaauacaccuaggaggaguauucgaacuacaaccaggagcaucaguauucguaaacguaacagaccccucacaaguaagccacggcacaggauucacaucauuuggacuauuaaaauuauaaggacuagugcaucacauuuaaaagcaucucagccuaccaugagaauaagagaaagaaaaugaagaucaauagcuuauucaucucuuuuucuuuuucguugguguaaagccaacacccugucuaaaaaacauaaauuucuuuaaucauuuugccucuuuucucugugcuucaauuaauaaaaaauggaaagaaccuagaucuaaaaaaaaaaaaaaaaaaaaaaaaaaaaaaaaaaaaaaaaaaaaaaaaaaaaaaaaaaaaaaaaugcaucccccccccccccccccccccccccccccccaaaggcucuuuucagagccaccagaauu

SEQ ID NO: 364 - RNA, 1249 nt, Artificial Sequence
  PDCD1 mRNA product TOP UTR opt7
ggggcgcugccuacggagguggcagccaucuccuucucggcaucaagcuuaccaugcagaucccccaagccccauggccgguggucugggcagugcugcagcucggcuggaggcccgggugguuccuggacagcccagaucggcccuggaacccacccaccuuuuccccagccuugcugguagugacugagggugacaaugcgaccuucacgugcaguuuuagcaacacuuccgaaaguuucguccucaauugguaccgcaugagcccguccaaccagaccgauaagcuggccgcauuucccgaggacaggagccagccaggccaagauugucgguuccgcgugacccaguugcccaaugggagggacuuucacauguccgugguccgggcccgcaggaacgauaguggcacuuaucugugcggugcaauuagccucgccccaaaagcgcagaucaaggaaucccugcgggccgagcugcgcgugaccgaaaggcgggcagagguacccacggcccauccgagccccaguccacgccccgccgggcaguuccaaacucucguggucggcguggugggcgggcuguuggguucccugguccuccugguguggguacuggcagugauuuguagcagggccgcgcggggcaccaucggggcccgcaggacuggccagccauugaaagaggaccccuccgcagucccaguguuuaguguggauuacggugaacucgacuuccaguggcgggagaagaccccggaacccccaguccccugcgugccagagcagaccgaguaugccacgauuguauuucccagcgggaugggcacuuccagcccggcacgcaggggcagugccgaugggccacgguccgcccaaccccugaggcccgaagacggucacuguagcuggccacugugaggacuagugcaucacauuuaaaagcaucucagccuaccaugagaauaagagaaagaaaaugaagaucaauagcuuauucaucucuuuuucuuuuucguugguguaaagccaacacccugucuaaaaaacauaaauuucuuuaaucauuuugccucuuuucucugugcuucaauuaauaaaaaauggaaagaaccuagaucuaaaaaaaaaaaaaaaaaaaaaaaaaaaaaaaaaaaaaaaaaaaaaaaaaaaaaaaaaaaaaaaaugcaucccccccccccccccccccccccccccccccaaaggcucuuuucagagccaccagaauu

SEQ ID NO: 365 - RNA, 832 nt, Artificial Sequence
  PDCD1(1-149) mRNA product TOP UTR opt7
ggggcgcugccuacggagguggcagccaucuccuucucggcaucaagcuuaccaugcagaucccccaagccccauggccgguggucugggcagugcugcagcucggcuggaggcccgggugguuccuggacagcccagaucggcccuggaacccacccaccuuuuccccagccuugcugguagugacugagggugacaaugcgaccuucacgugcaguuuuagcaacacuuccgaaaguuucguccucaauugguaccgcaugagcccguccaaccagaccgauaagcuggccgcauuucccgaggacaggagccagccaggccaagauugucgguuccgcgugacccaguugcccaaugggagggacuuucacauguccgugguccgggcccgcaggaacgauaguggcacuuaucugugcggugcaauuagccucgccccaaaagcgcagaucaaggaaucccugcgggccgagcugcgcgugaccgaaaggcgggcaugaggacuagugcaucacauuuaaaagcaucucagccuaccaugagaauaagagaaagaaaaugaagaucaauagcuuauucaucucuuuuucuuuuucguugguguaaagccaacacccugucuaaaaaacauaaauuucuuuaaucauuuugccucuuuucucugugcuucaauuaauaaaaaauggaaagaaccuagaucuaaaaaaaaaaaaaaaaaaaaaaaaaaaaaaaaaaaaaaaaaaaaaaaaaaaaaaaaaaaaaaaaugcaucccccccccccccccccccccccccccccccaaaggcucuuuucagagccaccagaauu

SEQ ID NO: 366 - RNA, 1042 nt, Artificial Sequence
  IL12A mRNA product TOP UTR opt7
ggggcgcugccuacggagguggcagccaucuccuucucggcaucaagcuuaccaugugccccgccaggagccugcuccugguggcaaccuugguccugcucgaccaccuguccuuggcccggaaccugccaguggcgacuccggaucccggcauguucccaugucuccaucacagucagaaucugcugcgcgccguaagcaacaugcuccaaaaggcaaggcagacccuggaguuuuaccccugcacguccgaagagaucgaccaugaagauauuacuaaagacaagaccaguaccguggaggccuguuugccacuggaacucacuaaaaaugagagcugccugaacucccgggagaccagcuucaucacgaauggguccugucuggcaagucgcaagacuagcuuuaugauggccuugugccucuccagcauuuaugaagaucugaaaauguaccaggucgaguucaagaccaugaacgcgaagcugcucauggaccccaaaaggcagaucuuucuggaucaaaauauguuggccgugauugacgaacugaugcaggcacucaacuucaauagugagacugugccacagaaguccagccuggaggaaccggauuuuuauaaaaccaagaucaaacuguguaucuugcuccacgccuuccggauucgcgccgucaccaucgacagggugauguccuaccugaacgcaaguugaggacuagugcaucacauuuaaaagcaucucagccuaccaugagaauaagagaaagaaaaugaagaucaauagcuuauucaucucuuuuucuuuuucguugguguaaagccaacacccugucuaaaaaacauaaauuucuuuaaucauuuugccucuuuucucugugcuucaauuaauaaaaaauggaaagaaccuagaucuaaaaaaaaaaaaaaaaaaaaaaaaaaaaaaaaaaaaaaaaaaaaaaaaaaaaaaaaaaaaaaaaugcaucccccccccccccccccccccccccccccccaaaggcucuuuucagagccaccagaauu

SEQ ID NO: 367 - RNA, 1039 nt, Artificial Sequence
  IL12A(1-219) mRNA product TOP UTR opt7
ggggcgcugccuacggagguggcagccaucuccuucucggcaucaagcuuaccaugugccccgccaggagccugcuccugguggcaaccuugguccugcucgaccaccuguccuuggcccggaaccugccaguggcgacuccggaucccggcauguucccaugucuccaucacagucagaaucugcugcgcgccguaagcaacaugcuccaaaaggcaaggcagacccuggaguuuuaccccugcacguccgaagagaucgaccaugaagauauuacuaaagacaagaccaguaccguggaggccuguuugccacuggaacucacuaaaaaugagagcugccugaacucccgggagaccagcuucaucacgaauggguccugucuggcaagucgcaagacuagcuuuaugauggccuugugccucuccagcauuuaugaagaucugaaaauguaccaggucgaguucaagaccaugaacgcgaagcugcucauggaccccaaaaggcagaucuuucuggaucaaaauauguuggccgugauugacgaacugaugcaggcacucaacuucaauagugagacugugccacagaaguccagccuggaggaaccggauuuuuauaaaaccaagaucaaacuguguaucuugcuccacgccuuccggauucgcgccgucaccaucgacagggugauguccuaccugaacgcaaguggacuagugcaucacauuuaaaagcaucucagccuaccaugagaauaagagaaagaaaaugaagaucaauagcuuauucaucucuuuuucuuuuucguugguguaaagccaacacccugucuaaaaaacauaaauuucuuuaaucauuuugccucuuuucucugugcuucaauuaauaaaaaauggaaagaaccuagaucuaaaaaaaaaaaaaaaaaaaaaaaaaaaaaaaaaaaaaaaaaaaaaaaaaaaaaaaaaaaaaaaaugcaucccccccccccccccccccccccccccccccaaaggcucuuuucagagccaccagaauu

SEQ ID NO: 368 - RNA, 976 nt, Artificial Sequence
  IL12A(23-219) mRNA product TOP UTR opt7
ggggcgcugccuacggagguggcagccaucuccuucucggcaucaagcuuacccggaaccugccaguggcgacuccggaucccggcauguucccaugucuccaucacagucagaaucugcugcgcgccguaagcaacaugcuccaaaaggcaaggcagacccuggaguuuuaccccugcacguccgaagagaucgaccaugaagauauuacuaaagacaagaccaguaccguggaggccuguuugccacuggaacucacuaaaaaugagagcugccugaacucccgggagaccagcuucaucacgaauggguccugucuggcaagucgcaagacuagcuuuaugauggccuugugccucuccagcauuuaugaagaucugaaaauguaccaggucgaguucaagaccaugaacgcgaagcugcucauggaccccaaaaggcagaucuuucuggaucaaaauauguuggccgugauugacgaacugaugcaggcacucaacuucaauagugagacugugccacagaaguccagccuggaggaaccggauuuuuauaaaaccaagaucaaacuguguaucuugcuccacgccuuccggauucgcgccgucaccaucgacagggugauguccuaccugaacgcaaguugaggacuagugcaucacauuuaaaagcaucucagccuaccaugagaauaagagaaagaaaaugaagaucaauagcuuauucaucucuuuuucuuuuucguugguguaaagccaacacccugucuaaaaaacauaaauuucuuuaaucauuuugccucuuuucucugugcuucaauuaauaaaaaauggaaagaaccuagaucuaaaaaaaaaaaaaaaaaaaaaaaaaaaaaaaaaaaaaaaaaaaaaaaaaaaaaaaaaaaaaaaaugcaucccccccccccccccccccccccccccccccaaaggcucuuuucagagccaccagaauu

SEQ ID NO: 369 - RNA, 1369 nt, Artificial Sequence
  IL12B mRNA product TOP UTR opt7
ggggcgcugccuacggagguggcagccaucuccuucucggcaucaagcuuaccaugugccaccagcaacuggugaucagcugguucucccucgucuuucuggccagucccuugguggcaauuugggagcugaagaaagacguauacguggucgaacucgauugguauccagacgccccgggcgagaugguggugcugaccugugauacucccgaagaggacgggaucaccuggacguuggaucagagcuccgaaguccuggguaguggcaagacucucaccauucaggugaaagaguucggggacgcgggccaguauaccugccauaaggguggggagguacugagccacucccugcuccuguugcauaaaaaggaagauggcaucuggagcacugacauucugaaggaucaaaaagagccaaagaacaaaaccuuucucaggugugaagccaagaauuacuccggccgguucacgugcugguggcugacuaccaucaguacugaccugaccuuuagcgugaaauccagccgcgggaguuccgauccccagggugucaccuguggcgcagccacguugagcgcagagagggugcgcggggacaacaaggaguacgaauauuccguggagugccaggaagauagugccuguccagcggccgaggaaagccuccccaucgaggucaugguggacgcaguacacaaacugaaguacgagaauuauacuuccagcuucuuuauucgggacaucauuaagccagauccgcccaaaaaccugcagcucaagccacugaaaaauaguaggcaaguggaagucuccugggaguaccccgacaccuggagcacuccacauaguuacuucuccuugaccuuuugcguccaggugcagggcaagagcaaacgggaaaagaaggaucgcguguucaccgacaaaacuagcgccacggugaucuguaggaagaacgccuccauuaguguacgggcacaggaucgcuauuacagcuccagcuggagugagugggccuccgugcccugcagcugaggacuagugcaucacauuuaaaagcaucucagccuaccaugagaauaagagaaagaaaaugaagaucaauagcuuauucaucucuuuuucuuuuucguugguguaaagccaacacccugucuaaaaaacauaaauuucuuuaaucauuuugccucuuuucucugugcuucaauuaauaaaaaauggaaagaaccuagaucuaaaaaaaaaaaaaaaaaaaaaaaaaaaaaaaaaaaaaaaaaaaaaaaaaaaaaaaaaaaaaaaaugcaucccccccccccccccccccccccccccccccaaaggcucuuuucagagccaccagaauu

SEQ ID NO: 370 - RNA, 1366 nt, Artificial Sequence
  IL12B(1-328) mRNA product TOP UTR opt7
ggggcgcugccuacggagguggcagccaucuccuucucggcaucaagcuuaccaugugccaccagcaacuggugaucagcugguucucccucgucuuucuggccagucccuugguggcaauuugggagcugaagaaagacguauacguggucgaacucgauugguauccagacgccccgggcgagaugguggugcugaccugugauacucccgaagaggacgggaucaccuggacguuggaucagagcuccgaaguccuggguaguggcaagacucucaccauucaggugaaagaguucggggacgcgggccaguauaccugccauaaggguggggagguacugagccacucccugcuccuguugcauaaaaaggaagauggcaucuggagcacugacauucugaaggaucaaaaagagccaaagaacaaaaccuuucucaggugugaagccaagaauuacuccggccgguucacgugcugguggcugacuaccaucaguacugaccugaccuuuagcgugaaauccagccgcgggaguuccgauccccagggugucaccuguggcgcagccacguugagcgcagagagggugcgcggggacaacaaggaguacgaauauuccguggagugccaggaagauagugccuguccagcggccgaggaaagccuccccaucgaggucaugguggacgcaguacacaaacugaaguacgagaauuauacuuccagcuucuuuauucgggacaucauuaagccagauccgcccaaaaaccugcagcucaagccacugaaaaauaguaggcaaguggaagucuccugggaguaccccgacaccuggagcacuccacauaguuacuucuccuugaccuuuugcguccaggugcagggcaagagcaaacgggaaaagaaggaucgcguguucaccgacaaaacuagcgccacggugaucuguaggaagaacgccuccauuaguguacgggcacaggaucgcuauuacagcuccagcuggagugagugggccuccgugcccugcagcggacuagugcaucacauuuaaaagcaucucagccuaccaugagaauaagagaaagaaaaugaagaucaauagcuuauucaucucuuuuucuuuuucguugguguaaagccaacacccugucuaaaaaacauaaauuucuuuaaucauuuugccucuuuucucugugcuucaauuaauaaaaaauggaaagaaccuagaucuaaaaaaaaaaaaaaaaaaaaaaaaaaaaaaaaaaaaaaaaaaaaaaaaaaaaaaaaaaaaaaaaugcaucccccccccccccccccccccccccccccccaaaggcucuuuucagagccaccagaauu

SEQ ID NO: 371 - RNA, 1303 nt, Artificial Sequence
  IL12B(23-328) mRNA product TOP UTR opt7
ggggcgcugccuacggagguggcagccaucuccuucucggcaucaagcuuaccauuugggagcugaagaaagacguauacguggucgaacucgauugguauccagacgccccgggcgagaugguggugcugaccugugauacucccgaagaggacgggaucaccuggacguuggaucagagcuccgaaguccuggguaguggcaagacucucaccauucaggugaaagaguucggggacgcgggccaguauaccugccauaaggguggggagguacugagccacucccugcuccuguugcauaaaaaggaagauggcaucuggagcacugacauucugaaggaucaaaaagagccaaagaacaaaaccuuucucaggugugaagccaagaauuacuccggccgguucacgugcugguggcugacuaccaucaguacugaccugaccuuuagcgugaaauccagccgcgggaguuccgauccccagggugucaccuguggcgcagccacguugagcgcagagagggugcgcggggacaacaaggaguacgaauauuccguggagugccaggaagauagugccuguccagcggccgaggaaagccuccccaucgaggucaugguggacgcaguacacaaacugaaguacgagaauuauacuuccagcuucuuuauucgggacaucauuaagccagauccgcccaaaaaccugcagcucaagccacugaaaaauaguaggcaaguggaagucuccugggaguaccccgacaccuggagcacuccacauaguuacuucuccuugaccuuuugcguccaggugcagggcaagagcaaacgggaaaagaaggaucgcguguucaccgacaaaacuagcgccacggugaucuguaggaagaacgccuccauuaguguacgggcacaggaucgcuauuacagcuccagcuggagugagugggccuccgugcccugcagcugaggacuagugcaucacauuuaaaagcaucucagccuaccaugagaauaagagaaagaaaaugaagaucaauagcuuauucaucucuuuuucuuuuucguugguguaaagccaacacccugucuaaaaaacauaaauuucuuuaaucauuuugccucuuuucucugugcuucaauuaauaaaaaauggaaagaaccuagaucuaaaaaaaaaaaaaaaaaaaaaaaaaaaaaaaaaaaaaaaaaaaaaaaaaaaaaaaaaaaaaaaaugcaucccccccccccccccccccccccccccccccaaaggcucuuuucagagccaccagaauu

SEQ ID NO: 372 - RNA, 436 nt, Artificial Sequence
  Linker-sFvCC49-218 mRNA product TOP UTR opt7
ggggcgcugccuacggagguggcagccaucuccuucucggcaucaagcuuaccggcagcaccuccgggagugguaagcccggcagcggggagggcuccacuaaagguggacuagugcaucacauuuaaaagcaucucagccuaccaugagaauaagagaaagaaaaugaagaucaauagcuuauucaucucuuuuucuuuuucguugguguaaagccaacacccugucuaaaaaacauaaauuucuuuaaucauuuugccucuuuucucugugcuucaauuaauaaaaaauggaaagaaccuagaucuaaaaaaaaaaaaaaaaaaaaaaaaaaaaaaaaaaaaaaaaaaaaaaaaaaaaaaaaaaaaaaaaugcaucccccccccccccccccccccccccccccccaaaggcucuuuucagagccaccagaauu

SEQ ID NO: 373 - RNA, 2014 nt, Artificial Sequence
  IL12 mRNA product TOP UTR opt7
ggggcgcugccuacggagguggcagccaucuccuucucggcaucaagcuuaccaugugccaccagcaacuggugaucagcugguucucccucgucuuucuggccagucccuugguggcaauuugggagcugaagaaagacguauacguggucgaacucgauugguauccagacgccccgggcgagaugguggugcugaccugugauacucccgaagaggacgggaucaccuggacguuggaucagagcuccgaaguccuggguaguggcaagacucucaccauucaggugaaagaguucggggacgcgggccaguauaccugccauaaggguggggagguacugagccacucccugcuccuguugcauaaaaaggaagauggcaucuggagcacugacauucugaaggaucaaaaagagccaaagaacaaaaccuuucucaggugugaagccaagaauuacuccggccgguucacgugcugguggcugacuaccaucaguacugaccugaccuuuagcgugaaauccagccgcgggaguuccgauccccagggugucaccuguggcgcagccacguugagcgcagagagggugcgcggggacaacaaggaguacgaauauuccguggagugccaggaagauagugccuguccagcggccgaggaaagccuccccaucgaggucaugguggacgcaguacacaaacugaaguacgagaauuauacuuccagcuucuuuauucgggacaucauuaagccagauccgcccaaaaaccugcagcucaagccacugaaaaauaguaggcaaguggaagucuccugggaguaccccgacaccuggagcacuccacauaguuacuucuccuugaccuuuugcguccaggugcagggcaagagcaaacgggaaaagaaggaucgcguguucaccgacaaaacuagcgccacggugaucuguaggaagaacgccuccauuaguguacgggcacaggaucgcuauuacagcuccagcuggagugagugggccuccgugcccugcagcggcagcaccuccgggagugguaagcccggcagcggggagggcuccacuaaaggucggaaccugccaguggcgacuccggaucccggcauguucccaugucuccaucacagucagaaucugcugcgcgccguaagcaacaugcuccaaaaggcaaggcagacccuggaguuuuaccccugcacguccgaagagaucgaccaugaagauauuacuaaagacaagaccaguaccguggaggccuguuugccacuggaacucacuaaaaaugagagcugccugaacucccgggagaccagcuucaucacgaauggguccugucuggcaagucgcaagacuagcuuuaugauggccuugugccucuccagcauuuaugaagaucugaaaauguaccaggucgaguucaagaccaugaacgcgaagcugcucauggaccccaaaaggcagaucuuucuggaucaaaauauguuggccgugauugacgaacugaugcaggcacucaacuucaauagugagacugugccacagaaguccagccuggaggaaccggauuuuuauaaaaccaagaucaaacuguguaucuugcuccacgccuuccggauucgcgccgucaccaucgacagggugauguccuaccugaacgcaaguugaggacuagugcaucacauuuaaaagcaucucagccuaccaugagaauaagagaaagaaaaugaagaucaauagcuuauucaucucuuuuucuuuuucguugguguaaagccaacacccugucuaaaaaacauaaauuucuuuaaucauuuugccucuuuucucugugcuucaauuaauaaaaaauggaaagaaccuagaucuaaaaaaaaaaaaaaaaaaaaaaaaaaaaaaaaaaaaaaaaaaaaaaaaaaaaaaaaaaaaaaaaugcaucccccccccccccccccccccccccccccccaaaggcucuuuucagagccaccagaauu

SEQ ID NO: 374 - RNA, 1168 nt, Artificial Sequence
  CD40LG mRNA product TOP UTR opt7
ggggcgcugccuacggagguggcagccaucuccuucucggcaucaagcuuaccaugaucgagaccuacaaccagacuagccccagguccgccgcaaccggccugccaauuaguaugaagaucuucauguaucuccugacgguguuuuugauuacucaaaugaucgggagcgcccuguucgcggucuaccuccaccggcgccuggacaaaauugaagaugagaggaauuugcaugaagacuuuguguucaugaagaccauccagcggugcaacaccggugagcgcucccugagucuccugaauugugaagagaucaaaagccaguuugagggcuucguaaaggauauuaugcugaacaaagaagagacuaagaaggaaaauuccuuugagaugcagaaaggggaccaaaacccgcagaucgccgcacacgugauuagcgaggccuccaguaagaccacgagcguccuccagugggcagaaaaaggcuauuacacuauguccaauaaccuggugaccuuggagaaugguaagcagcugacugugaaaaggcaagggcucuauuacaucuaugcccaggucaccuucugcagcaaccgggaagcgaguucccaggcccccuuuauugcaagccugugucugaaguccccaggccgcuucgagaggaucuugcuccgggccgccaauacccauaguagcgcaaaacccugcggccagcaauccauucaccucggggguguguuugaacugcagccaggcgccagcguauucgugaacgucacggaucccagucaggugucccaugggacuggcuucaccagcuuuggucugcugaaguugugaggacuagugcaucacauuuaaaagcaucucagccuaccaugagaauaagagaaagaaaaugaagaucaauagcuuauucaucucuuuuucuuuuucguugguguaaagccaacacccugucuaaaaaacauaaauuucuuuaaucauuuugccucuuuucucugugcuucaauuaauaaaaaauggaaagaaccuagaucuaaaaaaaaaaaaaaaaaaaaaaaaaaaaaaaaaaaaaaaaaaaaaaaaaaaaaaaaaaaaaaaaugcaucccccccccccccccccccccccccccccccaaaggcucuuuucagagccaccagaauu

SEQ ID NO: 375 - RNA, 1249 nt, Artificial Sequence
  PDCD1 mRNA product TOP UTR opt8
ggggcgcugccuacggagguggcagccaucuccuucucggcaucaagcuuaccaugcaaaucccacaagcccccuggcccguagucugggccguacuacaacuaggcuggagacccggcugguuucucgacagccccgaccgacccuggaacccccccaccuucucacccgcccuccucgucgucaccgaaggcgacaacgccacauucacaugcuccuucuccaacaccucugaaucauucguccuaaacugguaccgaaugucacccuccaaccaaacugacaaacucgccgccuuucccgaagaccgcucccaacccggccaagacugccgauuccgagucacacaacuuccuaacggcagagacuuccacauguccguaguccgagcccgccgaaacgacuccggaaccuaccucugcggagccaucucccucgcccccaaagcccaaaucaaagaaucccuccgagcagaacuccgcgucaccgaacgccgcgccgaaguccccaccgcacacccaucacccuccccccgccccgccggccaauuccaaacacuuguaguaggcgucgucggcggccuccuuggaucacucguccuacuuguauggguccuagccgucaucugcucucgcgccgcacgcggcaccaucggcgcacgacgaaccggccaaccucuaaaagaagaccccuccgcaguccccgucuucuccgucgacuacggcgaacucgacuuccaauggcgcgaaaaaacccccgaacccccaguccccugcguacccgaacaaaccgaauacgcaacaaucguauuccccucaggaaugggcaccucaucccccgcccgacgaggaucagccgacggcccacgauccgcccaaccccuccgaccagaagacggccacugcucauggccccuuuaaggacuagugcaucacauuuaaaagcaucucagccuaccaugagaauaagagaaagaaaaugaagaucaauagcuuauucaucucuuuuucuuuuucguugguguaaagccaacacccugucuaaaaaacauaaauuucuuuaaucauuuugccucuuuucucugugcuucaauuaauaaaaaauggaaagaaccuagaucuaaaaaaaaaaaaaaaaaaaaaaaaaaaaaaaaaaaaaaaaaaaaaaaaaaaaaaaaaaaaaaaaugcaucccccccccccccccccccccccccccccccaaaggcucuuuucagagccaccagaauu

SEQ ID NO: 376 - RNA, 832 nt, Artificial Sequence
  PDCD1(1-149) mRNA product TOP UTR opt8
ggggcgcugccuacggagguggcagccaucuccuucucggcaucaagcuuaccaugcaaaucccacaagcccccuggcccguagucugggccguacuacaacuaggcuggagacccggcugguuucucgacagccccgaccgacccuggaacccccccaccuucucacccgcccuccucgucgucaccgaaggcgacaacgccacauucacaugcuccuucuccaacaccucugaaucauucguccuaaacugguaccgaaugucacccuccaaccaaacugacaaacucgccgccuuucccgaagaccgcucccaacccggccaagacugccgauuccgagucacacaacuuccuaacggcagagacuuccacauguccguaguccgagcccgccgaaacgacuccggaaccuaccucugcggagccaucucccucgcccccaaagcccaaaucaaagaaucccuccgagcagaacuccgcgucaccgaacgccgcgccuaaggacuagugcaucacauuuaaaagcaucucagccuaccaugagaauaagagaaagaaaaugaagaucaauagcuuauucaucucuuuuucuuuuucguugguguaaagccaacacccugucuaaaaaacauaaauuucuuuaaucauuuugccucuuuucucugugcuucaauuaauaaaaaauggaaagaaccuagaucuaaaaaaaaaaaaaaaaaaaaaaaaaaaaaaaaaaaaaaaaaaaaaaaaaaaaaaaaaaaaaaaaugcaucccccccccccccccccccccccccccccccaaaggcucuuuucagagccaccagaauu

SEQ ID NO: 377 - RNA, 1042 nt, Artificial Sequence
  IL12A mRNA product TOP UTR opt8
ggggcgcugccuacggagguggcagccaucuccuucucggcaucaagcuuaccaugugccccgccagaucccuccuacucgucgcaacacuuguccuccucgaccaccucucccucgcccgcaaucuccccgucgccacccccgaccccggaauguuucccugccuccaccacucacaaaaccuccuacgcgccgucucaaacaugcuucaaaaagcccgacaaacccucgaauuuuaccccugcaccuccgaagaaaucgaccacgaagacauaaccaaagacaaaaccuccaccgucgaagccugccuaccauuagaacuaaccaaaaacgaauccugccucaacucacgcgaaaccuccuucaucacaaacggcucaugccucgccucacgcaaaaccuccuucaugauggcccucugccuaucaucaaucuaugaagaccucaaaauguaccaaguagaauuuaaaaccaugaacgccaaacuccucauggaccccaaacgccaaaucuuccucgaccaaaacaugcucgcagucaucgacgaacucaugcaagcccucaacuucaacucagaaacagucccacaaaaauccucccucgaagaacccgacuucuauaaaaccaaaaucaaacucugcauccuccuccacgccuuccgcauacgcgccguaaccaucgaccgcguaaugucauaccuaaaugccucuuaaggacuagugcaucacauuuaaaagcaucucagccuaccaugagaauaagagaaagaaaaugaagaucaauagcuuauucaucucuuuuucuuuuucguugguguaaagccaacacccugucuaaaaaacauaaauuucuuuaaucauuuugccucuuuucucugugcuucaauuaauaaaaaauggaaagaaccuagaucuaaaaaaaaaaaaaaaaaaaaaaaaaaaaaaaaaaaaaaaaaaaaaaaaaaaaaaaaaaaaaaaaugcaucccccccccccccccccccccccccccccccaaaggcucuuuucagagccaccagaauu

SEQ ID NO: 378 - RNA, 1039 nt, Artificial Sequence
  IL12A(1-219) mRNA product TOP UTR opt8
ggggcgcugccuacggagguggcagccaucuccuucucggcaucaagcuuaccaugugccccgccagaucccuccuacucgucgcaacacuuguccuccucgaccaccucucccucgcccgcaaucuccccgucgccacccccgaccccggaauguuucccugccuccaccacucacaaaaccuccuacgcgccgucucaaacaugcuucaaaaagcccgacaaacccucgaauuuuaccccugcaccuccgaagaaaucgaccacgaagacauaaccaaagacaaaaccuccaccgucgaagccugccuaccauuagaacuaaccaaaaacgaauccugccucaacucacgcgaaaccuccuucaucacaaacggcucaugccucgccucacgcaaaaccuccuucaugauggcccucugccuaucaucaaucuaugaagaccucaaaauguaccaaguagaauuuaaaaccaugaacgccaaacuccucauggaccccaaacgccaaaucuuccucgaccaaaacaugcucgcagucaucgacgaacucaugcaagcccucaacuucaacucagaaacagucccacaaaaauccucccucgaagaacccgacuucuauaaaaccaaaaucaaacucugcauccuccuccacgccuuccgcauacgcgccguaaccaucgaccgcguaaugucauaccuaaaugccucuggacuagugcaucacauuuaaaagcaucucagccuaccaugagaauaagagaaagaaaaugaagaucaauagcuuauucaucucuuuuucuuuuucguugguguaaagccaacacccugucuaaaaaacauaaauuucuuuaaucauuuugccucuuuucucugugcuucaauuaauaaaaaauggaaagaaccuagaucuaaaaaaaaaaaaaaaaaaaaaaaaaaaaaaaaaaaaaaaaaaaaaaaaaaaaaaaaaaaaaaaaugcaucccccccccccccccccccccccccccccccaaaggcucuuuucagagccaccagaauu

SEQ ID NO: 379 - RNA, 976 nt, Artificial Sequence
  IL12A(23-219) mRNA product TOP UTR opt8
ggggcgcugccuacggagguggcagccaucuccuucucggcaucaagcuuacccgcaaucuccccgucgccacccccgaccccggaauguuucccugccuccaccacucacaaaaccuccuacgcgccgucucaaacaugcuucaaaaagcccgacaaacccucgaauuuuaccccugcaccuccgaagaaaucgaccacgaagacauaaccaaagacaaaaccuccaccgucgaagccugccuaccauuagaacuaaccaaaaacgaauccugccucaacucacgcgaaaccuccuucaucacaaacggcucaugccucgccucacgcaaaaccuccuucaugauggcccucugccuaucaucaaucuaugaagaccucaaaauguaccaaguagaauuuaaaaccaugaacgccaaacuccucauggaccccaaacgccaaaucuuccucgaccaaaacaugcucgcagucaucgacgaacucaugcaagcccucaacuucaacucagaaacagucccacaaaaauccucccucgaagaacccgacuucuauaaaaccaaaaucaaacucugcauccuccuccacgccuuccgcauacgcgccguaaccaucgaccgcguaaugucauaccuaaaugccucuuaaggacuagugcaucacauuuaaaagcaucucagccuaccaugagaauaagagaaagaaaaugaagaucaauagcuuauucaucucuuuuucuuuuucguugguguaaagccaacacccugucuaaaaaacauaaauuucuuuaaucauuuugccucuuuucucugugcuucaauuaauaaaaaauggaaagaaccuagaucuaaaaaaaaaaaaaaaaaaaaaaaaaaaaaaaaaaaaaaaaaaaaaaaaaaaaaaaaaaaaaaaaugcaucccccccccccccccccccccccccccccccaaaggcucuuuucagagccaccagaauu

SEQ ID NO: 380 - RNA, 1369 nt, Artificial Sequence
  IL12B mRNA product TOP UTR opt8
ggggcgcugccuacggagguggcagccaucuccuucucggcaucaagcuuaccaugugccaccaacaacucgucauaagcugguucagccuaguauuccucgccucaccccucgucgccaucugggaacucaagaaagacguauacgucgucgaacuagacugguaccccgacgcacccggagaaaugguaguacucacaugcgacacccccgaagaagacggcaucacauggaccuuagaccaaucaucagaaguccucggauccggaaaaacccucacaauccaagucaaagaguucggcgacgccggccaauacacaugccacaaaggcggagaaguccucucacacucacuccuucuacuacacaagaaagaagacggcaucugguccaccgacauacucaaagaccaaaaagaacccaaaaacaaaaccuuccuccgcugcgaagccaaaaacuacuccggccgauucacaugcugguggcucaccaccaucuccaccgaccugaccuucuccgucaaauccagcaggggcuccucagacccacaaggcguaaccugcggcgcagccacccuaucggccgaacgaguccgcggagacaacaaagaauacgaauacagcgucgaaugccaagaagacucagcaugcccagcagccgaagaaucacuccccaucgaagucauggucgacgccguccacaaacuaaaauacgaaaacuacacaagcucauucuucauccgcgacauaaucaaacccgacccaccgaaaaaccuccaacucaaaccccuuaaaaacagccgccaagucgaagucuccugggaauaccccgacaccugguccacaccccacuccuacuucucacucaccuucugcguccaaguccaaggcaaauccaaacgcgaaaagaaagaccgcguauucaccgacaaaaccuccgccacagucaucugccgcaaaaacgccucaaucuccguccgcgcccaagaccgauacuacagcuccuccuggucagaaugggccuccgucccaugcuccuaaggacuagugcaucacauuuaaaagcaucucagccuaccaugagaauaagagaaagaaaaugaagaucaauagcuuauucaucucuuuuucuuuuucguugguguaaagccaacacccugucuaaaaaacauaaauuucuuuaaucauuuugccucuuuucucugugcuucaauuaauaaaaaauggaaagaaccuagaucuaaaaaaaaaaaaaaaaaaaaaaaaaaaaaaaaaaaaaaaaaaaaaaaaaaaaaaaaaaaaaaaaugcaucccccccccccccccccccccccccccccccaaaggcucuuuucagagccaccagaauu

SEQ ID NO: 381 - RNA, 1366 nt, Artificial Sequence
  IL12B(1-328) mRNA product TOP UTR opt8
ggggcgcugccuacggagguggcagccaucuccuucucggcaucaagcuuaccaugugccaccaacaacucgucauaagcugguucagccuaguauuccucgccucaccccucgucgccaucugggaacucaagaaagacguauacgucgucgaacuagacugguaccccgacgcacccggagaaaugguaguacucacaugcgacacccccgaagaagacggcaucacauggaccuuagaccaaucaucagaaguccucggauccggaaaaacccucacaauccaagucaaagaguucggcgacgccggccaauacacaugccacaaaggcggagaaguccucucacacucacuccuucuacuacacaagaaagaagacggcaucugguccaccgacauacucaaagaccaaaaagaacccaaaaacaaaaccuuccuccgcugcgaagccaaaaacuacuccggccgauucacaugcugguggcucaccaccaucuccaccgaccugaccuucuccgucaaauccagcaggggcuccucagacccacaaggcguaaccugcggcgcagccacccuaucggccgaacgaguccgcggagacaacaaagaauacgaauacagcgucgaaugccaagaagacucagcaugcccagcagccgaagaaucacuccccaucgaagucauggucgacgccguccacaaacuaaaauacgaaaacuacacaagcucauucuucauccgcgacauaaucaaacccgacccaccgaaaaaccuccaacucaaaccccuuaaaaacagccgccaagucgaagucuccugggaauaccccgacaccugguccacaccccacuccuacuucucacucaccuucugcguccaaguccaaggcaaauccaaacgcgaaaagaaagaccgcguauucaccgacaaaaccuccgccacagucaucugccgcaaaaacgccucaaucuccguccgcgcccaagaccgauacuacagcuccuccuggucagaaugggccuccgucccaugcuccggacuagugcaucacauuuaaaagcaucucagccuaccaugagaauaagagaaagaaaaugaagaucaauagcuuauucaucucuuuuucuuuuucguugguguaaagccaacacccugucuaaaaaacauaaauuucuuuaaucauuuugccucuuuucucugugcuucaauuaauaaaaaauggaaagaaccuagaucuaaaaaaaaaaaaaaaaaaaaaaaaaaaaaaaaaaaaaaaaaaaaaaaaaaaaaaaaaaaaaaaaugcaucccccccccccccccccccccccccccccccaaaggcucuuuucagagccaccagaauu

SEQ ID NO: 382 - RNA, 1303 nt, Artificial Sequence
  IL12B(23-328) mRNA product TOP UTR opt8
ggggcgcugccuacggagguggcagccaucuccuucucggcaucaagcuuaccaucugggaacucaagaaagacguauacgucgucgaacuagacugguaccccgacgcacccggagaaaugguaguacucacaugcgacacccccgaagaagacggcaucacauggaccuuagaccaaucaucagaaguccucggauccggaaaaacccucacaauccaagucaaagaguucggcgacgccggccaauacacaugccacaaaggcggagaaguccucucacacucacuccuucuacuacacaagaaagaagacggcaucugguccaccgacauacucaaagaccaaaaagaacccaaaaacaaaaccuuccuccgcugcgaagccaaaaacuacuccggccgauucacaugcugguggcucaccaccaucuccaccgaccugaccuucuccgucaaauccagcaggggcuccucagacccacaaggcguaaccugcggcgcagccacccuaucggccgaacgaguccgcggagacaacaaagaauacgaauacagcgucgaaugccaagaagacucagcaugcccagcagccgaagaaucacuccccaucgaagucauggucgacgccguccacaaacuaaaauacgaaaacuacacaagcucauucuucauccgcgacauaaucaaacccgacccaccgaaaaaccuccaacucaaaccccuuaaaaacagccgccaagucgaagucuccugggaauaccccgacaccugguccacaccccacuccuacuucucacucaccuucugcguccaaguccaaggcaaauccaaacgcgaaaagaaagaccgcguauucaccgacaaaaccuccgccacagucaucugccgcaaaaacgccucaaucuccguccgcgcccaagaccgauacuacagcuccuccuggucagaaugggccuccgucccaugcuccuaaggacuagugcaucacauuuaaaagcaucucagccuaccaugagaauaagagaaagaaaaugaagaucaauagcuuauucaucucuuuuucuuuuucguugguguaaagccaacacccugucuaaaaaacauaaauuucuuuaaucauuuugccucuuuucucugugcuucaauuaauaaaaaauggaaagaaccuagaucuaaaaaaaaaaaaaaaaaaaaaaaaaaaaaaaaaaaaaaaaaaaaaaaaaaaaaaaaaaaaaaaaugcaucccccccccccccccccccccccccccccccaaaggcucuuuucagagccaccagaauu

SEQ ID NO: 383 - RNA, 436 nt, Artificial Sequence
  Linker-sFvCC49-218 mRNA product TOP UTR opt8
ggggcgcugccuacggagguggcagccaucuccuucucggcaucaagcuuaccgggagcacgagcgggagcgggaagccgggaaguggagagggaaguacaaagggaggacuagugcaucacauuuaaaagcaucucagccuaccaugagaauaagagaaagaaaaugaagaucaauagcuuauucaucucuuuuucuuuuucguugguguaaagccaacacccugucuaaaaaacauaaauuucuuuaaucauuuugccucuuuucucugugcuucaauuaauaaaaaauggaaagaaccuagaucuaaaaaaaaaaaaaaaaaaaaaaaaaaaaaaaaaaaaaaaaaaaaaaaaaaaaaaaaaaaaaaaaugcaucccccccccccccccccccccccccccccccaaaggcucuuuucagagccaccagaauu

SEQ ID NO: 384 - RNA, 2014 nt, Artificial Sequence
  IL12 mRNA product TOP UTR opt8
ggggcgcugccuacggagguggcagccaucuccuucucggcaucaagcuuaccaugugccaccaacaacucgucauaagcugguucagccuaguauuccucgccucaccccucgucgccaucugggaacucaagaaagacguauacgucgucgaacuagacugguaccccgacgcacccggagaaaugguaguacucacaugcgacacccccgaagaagacggcaucacauggaccuuagaccaaucaucagaaguccucggauccggaaaaacccucacaauccaagucaaagaguucggcgacgccggccaauacacaugccacaaaggcggagaaguccucucacacucacuccuucuacuacacaagaaagaagacggcaucugguccaccgacauacucaaagaccaaaaagaacccaaaaacaaaaccuuccuccgcugcgaagccaaaaacuacuccggccgauucacaugcugguggcucaccaccaucuccaccgaccugaccuucuccgucaaauccagcaggggcuccucagacccacaaggcguaaccugcggcgcagccacccuaucggccgaacgaguccgcggagacaacaaagaauacgaauacagcgucgaaugccaagaagacucagcaugcccagcagccgaagaaucacuccccaucgaagucauggucgacgccguccacaaacuaaaauacgaaaacuacacaagcucauucuucauccgcgacauaaucaaacccgacccaccgaaaaaccuccaacucaaaccccuuaaaaacagccgccaagucgaagucuccugggaauaccccgacaccugguccacaccccacuccuacuucucacucaccuucugcguccaaguccaaggcaaauccaaacgcgaaaagaaagaccgcguauucaccgacaaaaccuccgccacagucaucugccgcaaaaacgccucaaucuccguccgcgcccaagaccgauacuacagcuccuccuggucagaaugggccuccgucccaugcuccgggagcacgagcgggagcgggaagccgggaaguggagagggaaguacaaagggacgcaaucuccccgucgccacccccgaccccggaauguuucccugccuccaccacucacaaaaccuccuacgcgccgucucaaacaugcuucaaaaagcccgacaaacccucgaauuuuaccccugcaccuccgaagaaaucgaccacgaagacauaaccaaagacaaaaccuccaccgucgaagccugccuaccauuagaacuaaccaaaaacgaauccugccucaacucacgcgaaaccuccuucaucacaaacggcucaugccucgccucacgcaaaaccuccuucaugauggcccucugccuaucaucaaucuaugaagaccucaaaauguaccaaguagaauuuaaaaccaugaacgccaaacuccucauggaccccaaacgccaaaucuuccucgaccaaaacaugcucgcagucaucgacgaacucaugcaagcccucaacuucaacucagaaacagucccacaaaaauccucccucgaagaacccgacuucuauaaaaccaaaaucaaacucugcauccuccuccacgccuuccgcauacgcgccguaaccaucgaccgcguaaugucauaccuaaaugccucuuaaggacuagugcaucacauuuaaaagcaucucagccuaccaugagaauaagagaaagaaaaugaagaucaauagcuuauucaucucuuuuucuuuuucguugguguaaagccaacacccugucuaaaaaacauaaauuucuuuaaucauuuugccucuuuucucugugcuucaauuaauaaaaaauggaaagaaccuagaucuaaaaaaaaaaaaaaaaaaaaaaaaaaaaaaaaaaaaaaaaaaaaaaaaaaaaaaaaaaaaaaaaugcaucccccccccccccccccccccccccccccccaaaggcucuuuucagagccaccagaauu

SEQ ID NO: 385 - RNA, 1168 nt, Artificial Sequence
  CD40LG mRNA product TOP UTR opt8
ggggcgcugccuacggagguggcagccaucuccuucucggcaucaagcuuaccaugauagaaaccuacaaccaaaccucuccccgauccgcagccaccggccuccccaucuccaugaaaaucuucauguaccuccuaaccgucuuccuaaucacucaaaugaucggcuccgcucucuucgcagucuaccuccaccgccgccuagacaaaaucgaagacgaacgcaaccuacacgaagacuucgucuucaugaaaaccauucaacgcugcaacacaggcgaacgaucccuaucccuacucaacugcgaagaaaucaaaucccaauucgaaggcuuuguaaaagacaucaugcucaacaaagaagaaaccaaaaaagaaaacuccuucgaaaugcaaaaaggcgaccaaaacccccaaauagccgcccaugucauaucagaagccuccuccaaaaccaccuccguccuccaaugggccgaaaaaggcuacuacaccauguccaacaaccuaguaacccuugaaaacggcaaacaacucaccguaaaacgccaaggccucuacuacaucuacgcccaagucaccuucugcuccaacagagaagcauccucccaagcacccuucaucgccucccuaugccucaaaucccccggccgcuucgaacgaauccuccuccgcgccgccaacacucacuccucagccaaacccugcggccaacaaaguauacaccuuggcggagucuucgaacuccaacccggcgccuccgucuucguaaacgucaccgaccccucacaagucucccacggaaccggauucaccuccuucggccuacuaaaacuauagggacuagugcaucacauuuaaaagcaucucagccuaccaugagaauaagagaaagaaaaugaagaucaauagcuuauucaucucuuuuucuuuuucguugguguaaagccaacacccugucuaaaaaacauaaauuucuuuaaucauuuugccucuuuucucugugcuucaauuaauaaaaaauggaaagaaccuagaucuaaaaaaaaaaaaaaaaaaaaaaaaaaaaaaaaaaaaaaaaaaaaaaaaaaaaaaaaaaaaaaaaugcaucccccccccccccccccccccccccccccccaaaggcucuuuucagagccaccagaauu

SEQ ID NO: 386 - RNA, 1249 nt, Artificial Sequence
  PDCD1 mRNA product TOP UTR opt9
ggggcgcugccuacggagguggcagccaucuccuucucggcaucaagcuuaccaugcaaaucccccaagccccauggcccgucgucugggccguccuccaacucggcuggcgccccggaugguuccuagacucuccagaccgccccuggaauccacccaccuucucccccgcccuccuagucgucaccgaaggcgacaacgccaccuucaccuguucauucuccaacaccucagaauccuucguacucaacugguaccgcauguccccaagcaaccaaacagacaaacucgccgccuuccccgaagaccgcucccaacccggucaagacugccgauuccgcgucacccaacuccccaacggacgcgacuuccacauguccgucguucgagcacgacgcaacgacucaggcacauaccuaugcggagccaucucccuagcccccaaagcccaaaucaaagaaucacuacgcgccgaacuccgcgucaccgaacgccgcgccgaaguacccacagcccacccauccccaucaccacgcccagcaggucaauuccaaaccuuagucgucggagucgucggcggccuccuaggcucacucguccuccuagucuggguccucgccgucauaugcagccgcgccgcacgcggcaccaucggcgccagacgcaccggacaaccccucaaagaagaccccucagccguccccgucuuuuccgucgacuacggcgaacuagacuuccaauggcgcgaaaaaacccccgaaccccccgucccaugcguacccgaacaaaccgaauacgccacaauagucuucccauccggcaugggaaccucaucacccgccagacgaggcucagcagauggcccccgcuccgcacaaccacuccgaccagaagacggccacugcagcuggccccuguaaggacuagugcaucacauuuaaaagcaucucagccuaccaugagaauaagagaaagaaaaugaagaucaauagcuuauucaucucuuuuucuuuuucguugguguaaagccaacacccugucuaaaaaacauaaauuucuuuaaucauuuugccucuuuucucugugcuucaauuaauaaaaaauggaaagaaccuagaucuaaaaaaaaaaaaaaaaaaaaaaaaaaaaaaaaaaaaaaaaaaaaaaaaaaaaaaaaaaaaaaaaugcaucccccccccccccccccccccccccccccccaaaggcucuuuucagagccaccagaauu

SEQ ID NO: 387 - RNA, 832 nt, Artificial Sequence
  PDCD1(1-149) mRNA product TOP UTR opt9
ggggcgcugccuacggagguggcagccaucuccuucucggcaucaagcuuaccaugcaaaucccccaagccccauggcccgucgucugggccguccuccaacucggcuggcgccccggaugguuccuagacucuccagaccgccccuggaauccacccaccuucucccccgcccuccuagucgucaccgaaggcgacaacgccaccuucaccuguucauucuccaacaccucagaauccuucguacucaacugguaccgcauguccccaagcaaccaaacagacaaacucgccgccuuccccgaagaccgcucccaacccggucaagacugccgauuccgcgucacccaacuccccaacggacgcgacuuccacauguccgucguucgagcacgacgcaacgacucaggcacauaccuaugcggagccaucucccuagcccccaaagcccaaaucaaagaaucacuacgcgccgaacuccgcgucaccgaacgccgcgccuaaggacuagugcaucacauuuaaaagcaucucagccuaccaugagaauaagagaaagaaaaugaagaucaauagcuuauucaucucuuuuucuuuuucguugguguaaagccaacacccugucuaaaaaacauaaauuucuuuaaucauuuugccucuuuucucugugcuucaauuaauaaaaaauggaaagaaccuagaucuaaaaaaaaaaaaaaaaaaaaaaaaaaaaaaaaaaaaaaaaaaaaaaaaaaaaaaaaaaaaaaaaugcaucccccccccccccccccccccccccccccccaaaggcucuuuucagagccaccagaauu

SEQ ID NO: 388 - RNA, 1042 nt, Artificial Sequence
  IL12A mRNA product TOP UTR opt9
ggggcgcugccuacggagguggcagccaucuccuucucggcaucaagcuuaccaugugccccgccagaucccuccuccucgucgcaacccucguccuccucgaccaccucucccuagcacguaaccucccagucgccaccccagaccccggaauguuccccugccuccaucacucccaaaaucuccuccgugccgucuccaacaugcuccaaaaagcccgccaaacccucgaauuuuauccaugcaccuccgaagaaauagaccaugaagacaucaccaaagacaaaacauccaccgucgaagccugccucccccucgaacucacaaaaaacgaaucaugccucaacucccgcgaaaccuccuucauaaccaacggcucaugccucgccucucgcaaaaccucauucaugauggcccucugccuauccucuaucuacgaagaccucaaaauguaccaagucgaauuuaaaaccaugaacgccaaacuccucauggaccccaaacgccaaaucuuccucgaccaaaacaugcucgcagucaucgacgaacucaugcaagcacucaacuucaacucagaaaccgucccccaaaaauccucccucgaagaacccgacuucuacaaaacaaaaauaaaacucugcauccuccuccacgccuuccgcauccgagcagucaccaucgaucgcgucauguccuaccuaaacgccuccuaaggacuagugcaucacauuuaaaagcaucucagccuaccaugagaauaagagaaagaaaaugaagaucaauagcuuauucaucucuuuuucuuuuucguugguguaaagccaacacccugucuaaaaaacauaaauuucuuuaaucauuuugccucuuuucucugugcuucaauuaauaaaaaauggaaagaaccuagaucuaaaaaaaaaaaaaaaaaaaaaaaaaaaaaaaaaaaaaaaaaaaaaaaaaaaaaaaaaaaaaaaaugcaucccccccccccccccccccccccccccccccaaaggcucuuuucagagccaccagaauu

SEQ ID NO: 389 - RNA, 1039 nt, Artificial Sequence
  IL12A(1-219) mRNA product TOP UTR opt9
ggggcgcugccuacggagguggcagccaucuccuucucggcaucaagcuuaccaugugccccgccagaucccuccuccucgucgcaacccucguccuccucgaccaccucucccuagcacguaaccucccagucgccaccccagaccccggaauguuccccugccuccaucacucccaaaaucuccuccgugccgucuccaacaugcuccaaaaagcccgccaaacccucgaauuuuauccaugcaccuccgaagaaauagaccaugaagacaucaccaaagacaaaacauccaccgucgaagccugccucccccucgaacucacaaaaaacgaaucaugccucaacucccgcgaaaccuccuucauaaccaacggcucaugccucgccucucgcaaaaccucauucaugauggcccucugccuauccucuaucuacgaagaccucaaaauguaccaagucgaauuuaaaaccaugaacgccaaacuccucauggaccccaaacgccaaaucuuccucgaccaaaacaugcucgcagucaucgacgaacucaugcaagcacucaacuucaacucagaaaccgucccccaaaaauccucccucgaagaacccgacuucuacaaaacaaaaauaaaacucugcauccuccuccacgccuuccgcauccgagcagucaccaucgaucgcgucauguccuaccuaaacgccuccggacuagugcaucacauuuaaaagcaucucagccuaccaugagaauaagagaaagaaaaugaagaucaauagcuuauucaucucuuuuucuuuuucguugguguaaagccaacacccugucuaaaaaacauaaauuucuuuaaucauuuugccucuuuucucugugcuucaauuaauaaaaaauggaaagaaccuagaucuaaaaaaaaaaaaaaaaaaaaaaaaaaaaaaaaaaaaaaaaaaaaaaaaaaaaaaaaaaaaaaaaugcaucccccccccccccccccccccccccccccccaaaggcucuuuucagagccaccagaauu

SEQ ID NO: 390 - RNA, 976 nt, Artificial Sequence
  IL12A(23-219) mRNA product TOP UTR opt9
ggggcgcugccuacggagguggcagccaucuccuucucggcaucaagcuuacccguaaccucccagucgccaccccagaccccggaauguuccccugccuccaucacucccaaaaucuccuccgugccgucuccaacaugcuccaaaaagcccgccaaacccucgaauuuuauccaugcaccuccgaagaaauagaccaugaagacaucaccaaagacaaaacauccaccgucgaagccugccucccccucgaacucacaaaaaacgaaucaugccucaacucccgcgaaaccuccuucauaaccaacggcucaugccucgccucucgcaaaaccucauucaugauggcccucugccuauccucuaucuacgaagaccucaaaauguaccaagucgaauuuaaaaccaugaacgccaaacuccucauggaccccaaacgccaaaucuuccucgaccaaaacaugcucgcagucaucgacgaacucaugcaagcacucaacuucaacucagaaaccgucccccaaaaauccucccucgaagaacccgacuucuacaaaacaaaaauaaaacucugcauccuccuccacgccuuccgcauccgagcagucaccaucgaucgcgucauguccuaccuaaacgccuccuaaggacuagugcaucacauuuaaaagcaucucagccuaccaugagaauaagagaaagaaaaugaagaucaauagcuuauucaucucuuuuucuuuuucguugguguaaagccaacacccugucuaaaaaacauaaauuucuuuaaucauuuugccucuuuucucugugcuucaauuaauaaaaaauggaaagaaccuagaucuaaaaaaaaaaaaaaaaaaaaaaaaaaaaaaaaaaaaaaaaaaaaaaaaaaaaaaaaaaaaaaaaugcaucccccccccccccccccccccccccccccccaaaggcucuuuucagagccaccagaauu

SEQ ID NO: 391 - RNA, 1369 nt, Artificial Sequence
  IL12B mRNA product TOP UTR opt9
ggggcgcugccuacggagguggcagccaucuccuucucggcaucaagcuuaccaugugucaccaacaacuuguaaucagcugguucucccucgucuuccucgccucaccccucgucgccaucugggaacucaaaaaagacgucuacguagucgaacucgacugguaccccgacgccccaggagaaauggucguacucaccugugacacccccgaagaagacggcaucaccuggacccucgaccaauccuccgaaguccucgguucaggaaaaacccucaccauccaaguaaaagaauuuggcgacgccgggcaauauaccugccacaaaggcggcgagguccuaucccacucacuccuccuccuccacaagaaagaagacggaaucugguccaccgacauccuuaaagaccaaaaagaaccaaaaaacaaaacauuccuccgcugcgaagccaaaaacuacagcggccgcuucaccuguugguggcuaaccacaauaucaaccgacuuaaccuucagcgucaaauccuccagaggauccagcgacccacaaggaguuaccugcggagccgcaacacucagcgccgaacgaguccgcggagacaacaaagaauacgaauacuccgucgaaugccaagaagacucagcaugccccgccgcagaagaaucccuacccaucgaaguaaugguagacgccguccacaaacucaaauacgaaaacuacaccagcuccuucuucauccgagacaucaucaaacccgaccccccaaaaaaccuccaacuaaaaccccucaaaaacagccgccaaguagaaguauccugggaauaccccgacaccugguccacaccccacuccuacuucucgcucacguucugcguccaaguccaaggcaaauccaaacgagaaaaaaaagaccgcgucuucaccgacaaaacuuccgccaccgucaucugccgcaaaaacgccagcaucagcguccgcgcacaagaccgcuacuacucaagcuccugguccgaaugggccuccgucccaugcucauaaggacuagugcaucacauuuaaaagcaucucagccuaccaugagaauaagagaaagaaaaugaagaucaauagcuuauucaucucuuuuucuuuuucguugguguaaagccaacacccugucuaaaaaacauaaauuucuuuaaucauuuugccucuuuucucugugcuucaauuaauaaaaaauggaaagaaccuagaucuaaaaaaaaaaaaaaaaaaaaaaaaaaaaaaaaaaaaaaaaaaaaaaaaaaaaaaaaaaaaaaaaugcaucccccccccccccccccccccccccccccccaaaggcucuuuucagagccaccagaauu

SEQ ID NO: 392 - RNA, 1366 nt, Artificial Sequence
  IL12B(1-328) mRNA product TOP UTR opt9
ggggcgcugccuacggagguggcagccaucuccuucucggcaucaagcuuaccaugugucaccaacaacuuguaaucagcugguucucccucgucuuccucgccucaccccucgucgccaucugggaacucaaaaaagacgucuacguagucgaacucgacugguaccccgacgccccaggagaaauggucguacucaccugugacacccccgaagaagacggcaucaccuggacccucgaccaauccuccgaaguccucgguucaggaaaaacccucaccauccaaguaaaagaauuuggcgacgccgggcaauauaccugccacaaaggcggcgagguccuaucccacucacuccuccuccuccacaagaaagaagacggaaucugguccaccgacauccuuaaagaccaaaaagaaccaaaaaacaaaacauuccuccgcugcgaagccaaaaacuacagcggccgcuucaccuguugguggcuaaccacaauaucaaccgacuuaaccuucagcgucaaauccuccagaggauccagcgacccacaaggaguuaccugcggagccgcaacacucagcgccgaacgaguccgcggagacaacaaagaauacgaauacuccgucgaaugccaagaagacucagcaugccccgccgcagaagaaucccuacccaucgaaguaaugguagacgccguccacaaacucaaauacgaaaacuacaccagcuccuucuucauccgagacaucaucaaacccgaccccccaaaaaaccuccaacuaaaaccccucaaaaacagccgccaaguagaaguauccugggaauaccccgacaccugguccacaccccacuccuacuucucgcucacguucugcguccaaguccaaggcaaauccaaacgagaaaaaaaagaccgcgucuucaccgacaaaacuuccgccaccgucaucugccgcaaaaacgccagcaucagcguccgcgcacaagaccgcuacuacucaagcuccugguccgaaugggccuccgucccaugcucaggacuagugcaucacauuuaaaagcaucucagccuaccaugagaauaagagaaagaaaaugaagaucaauagcuuauucaucucuuuuucuuuuucguugguguaaagccaacacccugucuaaaaaacauaaauuucuuuaaucauuuugccucuuuucucugugcuucaauuaauaaaaaauggaaagaaccuagaucuaaaaaaaaaaaaaaaaaaaaaaaaaaaaaaaaaaaaaaaaaaaaaaaaaaaaaaaaaaaaaaaaugcaucccccccccccccccccccccccccccccccaaaggcucuuuucagagccaccagaauu

SEQ ID NO: 393 - RNA, 1303 nt, Artificial Sequence
  IL12B(23-328) mRNA product TOP UTR opt9
ggggcgcugccuacggagguggcagccaucuccuucucggcaucaagcuuaccaucugggaacucaaaaaagacgucuacguagucgaacucgacugguaccccgacgccccaggagaaauggucguacucaccugugacacccccgaagaagacggcaucaccuggacccucgaccaauccuccgaaguccucgguucaggaaaaacccucaccauccaaguaaaagaauuuggcgacgccgggcaauauaccugccacaaaggcggcgagguccuaucccacucacuccuccuccuccacaagaaagaagacggaaucugguccaccgacauccuuaaagaccaaaaagaaccaaaaaacaaaacauuccuccgcugcgaagccaaaaacuacagcggccgcuucaccuguugguggcuaaccacaauaucaaccgacuuaaccuucagcgucaaauccuccagaggauccagcgacccacaaggaguuaccugcggagccgcaacacucagcgccgaacgaguccgcggagacaacaaagaauacgaauacuccgucgaaugccaagaagacucagcaugccccgccgcagaagaaucccuacccaucgaaguaaugguagacgccguccacaaacucaaauacgaaaacuacaccagcuccuucuucauccgagacaucaucaaacccgaccccccaaaaaaccuccaacuaaaaccccucaaaaacagccgccaaguagaaguauccugggaauaccccgacaccugguccacaccccacuccuacuucucgcucacguucugcguccaaguccaaggcaaauccaaacgagaaaaaaaagaccgcgucuucaccgacaaaacuuccgccaccgucaucugccgcaaaaacgccagcaucagcguccgcgcacaagaccgcuacuacucaagcuccugguccgaaugggccuccgucccaugcucauaaggacuagugcaucacauuuaaaagcaucucagccuaccaugagaauaagagaaagaaaaugaagaucaauagcuuauucaucucuuuuucuuuuucguugguguaaagccaacacccugucuaaaaaacauaaauuucuuuaaucauuuugccucuuuucucugugcuucaauuaauaaaaaauggaaagaaccuagaucuaaaaaaaaaaaaaaaaaaaaaaaaaaaaaaaaaaaaaaaaaaaaaaaaaaaaaaaaaaaaaaaaugcaucccccccccccccccccccccccccccccccaaaggcucuuuucagagccaccagaauu

SEQ ID NO: 394 - RNA, 436 nt, Artificial Sequence
  Linker-sFvCC49-218 mRNA product TOP UTR opt9
ggggcgcugccuacggagguggcagccaucuccuucucggcaucaagcuuaccgggaguacgagugggagugggaagccggggaguggggaggggaguacgaaggggggacuagugcaucacauuuaaaagcaucucagccuaccaugagaauaagagaaagaaaaugaagaucaauagcuuauucaucucuuuuucuuuuucguugguguaaagccaacacccugucuaaaaaacauaaauuucuuuaaucauuuugccucuuuucucugugcuucaauuaauaaaaaauggaaagaaccuagaucuaaaaaaaaaaaaaaaaaaaaaaaaaaaaaaaaaaaaaaaaaaaaaaaaaaaaaaaaaaaaaaaaugcaucccccccccccccccccccccccccccccccaaaggcucuuuucagagccaccagaauu

SEQ ID NO: 395 - RNA, 2014 nt, Artificial Sequence
  IL12 mRNA product TOP UTR opt9
ggggcgcugccuacggagguggcagccaucuccuucucggcaucaagcuuaccaugugucaccaacaacuuguaaucagcugguucucccucgucuuccucgccucaccccucgucgccaucugggaacucaaaaaagacgucuacguagucgaacucgacugguaccccgacgccccaggagaaauggucguacucaccugugacacccccgaagaagacggcaucaccuggacccucgaccaauccuccgaaguccucgguucaggaaaaacccucaccauccaaguaaaagaauuuggcgacgccgggcaauauaccugccacaaaggcggcgagguccuaucccacucacuccuccuccuccacaagaaagaagacggaaucugguccaccgacauccuuaaagaccaaaaagaaccaaaaaacaaaacauuccuccgcugcgaagccaaaaacuacagcggccgcuucaccuguugguggcuaaccacaauaucaaccgacuuaaccuucagcgucaaauccuccagaggauccagcgacccacaaggaguuaccugcggagccgcaacacucagcgccgaacgaguccgcggagacaacaaagaauacgaauacuccgucgaaugccaagaagacucagcaugccccgccgcagaagaaucccuacccaucgaaguaaugguagacgccguccacaaacucaaauacgaaaacuacaccagcuccuucuucauccgagacaucaucaaacccgaccccccaaaaaaccuccaacuaaaaccccucaaaaacagccgccaaguagaaguauccugggaauaccccgacaccugguccacaccccacuccuacuucucgcucacguucugcguccaaguccaaggcaaauccaaacgagaaaaaaaagaccgcgucuucaccgacaaaacuuccgccaccgucaucugccgcaaaaacgccagcaucagcguccgcgcacaagaccgcuacuacucaagcuccugguccgaaugggccuccgucccaugcucagggaguacgagugggagugggaagccggggaguggggaggggaguacgaaggggcguaaccucccagucgccaccccagaccccggaauguuccccugccuccaucacucccaaaaucuccuccgugccgucuccaacaugcuccaaaaagcccgccaaacccucgaauuuuauccaugcaccuccgaagaaauagaccaugaagacaucaccaaagacaaaacauccaccgucgaagccugccucccccucgaacucacaaaaaacgaaucaugccucaacucccgcgaaaccuccuucauaaccaacggcucaugccucgccucucgcaaaaccucauucaugauggcccucugccuauccucuaucuacgaagaccucaaaauguaccaagucgaauuuaaaaccaugaacgccaaacuccucauggaccccaaacgccaaaucuuccucgaccaaaacaugcucgcagucaucgacgaacucaugcaagcacucaacuucaacucagaaaccgucccccaaaaauccucccucgaagaacccgacuucuacaaaacaaaaauaaaacucugcauccuccuccacgccuuccgcauccgagcagucaccaucgaucgcgucauguccuaccuaaacgccuccuaaggacuagugcaucacauuuaaaagcaucucagccuaccaugagaauaagagaaagaaaaugaagaucaauagcuuauucaucucuuuuucuuuuucguugguguaaagccaacacccugucuaaaaaacauaaauuucuuuaaucauuuugccucuuuucucugugcuucaauuaauaaaaaauggaaagaaccuagaucuaaaaaaaaaaaaaaaaaaaaaaaaaaaaaaaaaaaaaaaaaaaaaaaaaaaaaaaaaaaaaaaaugcaucccccccccccccccccccccccccccccccaaaggcucuuuucagagccaccagaauu

SEQ ID NO: 396 - RNA, 1168 nt, Artificial Sequence
  CD40LG mRNA product TOP UTR opt9
ggggcgcugccuacggagguggcagccaucuccuucucggcaucaagcuuaccaugaucgaaacauacaaccaaacauccccccgcuccgccgccacaggccuccccaucuccaugaaaaucuucauguaccuccucacaguauuccucaucacccaaaugaucggcuccgcacucuuugcagucuaucuccaccgucgccucgacaaaaucgaagacgaacgcaaccuccacgaagacuucgucuucaugaaaaccauacaacgcugcaacaccggcgaacgcucacucucccuacuaaacugcgaagaaaucaaaucccaauucgaaggcuucgucaaagacaucaugcuaaacaaagaagaaacaaaaaaagaaaacuccuucgaaaugcaaaaaggcgaccaaaacccccaaauagccgcccacgucaucuccgaagccuccuccaaaaccaccuccguccuccaaugggccgaaaaaggcuacuacacaauguccaacaaccucgucacccucgaaaacggcaaacaacucaccgucaaacgccaaggccucuacuacaucuacgcccaaguaaccuucugcuccaaccgcgaagccucaucucaagcucccuucaucgccucacucugccucaaaucacccggccgcuucgaaagaauccuccuccgcgccgcaaacacccacucauccgccaaacccugcggccaacaauccauacaccucggcggcguuuucgagcuccaaccuggcgccuccgucuucguaaacgucaccgaccccucacaagucucccacgguaccggcuucaccuccuucggacuccuaaaacucuaaggacuagugcaucacauuuaaaagcaucucagccuaccaugagaauaagagaaagaaaaugaagaucaauagcuuauucaucucuuuuucuuuuucguugguguaaagccaacacccugucuaaaaaacauaaauuucuuuaaucauuuugccucuuuucucugugcuucaauuaauaaaaaauggaaagaaccuagaucuaaaaaaaaaaaaaaaaaaaaaaaaaaaaaaaaaaaaaaaaaaaaaaaaaaaaaaaaaaaaaaaaugcaucccccccccccccccccccccccccccccccaaaggcucuuuucagagccaccagaauu

SEQ ID NO: 397 - RNA, 1249 nt, Artificial Sequence
  PDCD1 mRNA product TOP UTR opt10
ggggcgcugccuacggagguggcagccaucuccuucucggcaucaagcuuaccaugcaaaucccccaagcccccuggccggucgucugggccguccuccaacucggcuggcgccccggaugguuccucgacucccccgaccgcccguggaacccccccaccuucucccccgcccuccuagucgucaccgaaggcgacaacgccaccuucaccuguuccuucuccaacaccucagaauccuucguccucaacugguaccgcaugucccccuccaaccaaaccgacaaacucgccgccuuccccgaagaccgaucccaacccggccaagacugccgcuuccgcgucacacaacuucccaacggacgcgacuuucacauguccgucguccgcgcccgccgcaacgacuccggcaccuaccucugcggcgccaucucccucgcccccaaagcccaaaucaaagaaucccucagagccgaacuccgcgucaccgaacggcgcgccgaaguccccacugcccaccccucccccuccccccgccccgccggccaauuccaaacccucgucgucggcguugucggcggccuccucggcucacucguccuccucgucuggguacucgccgucaucugcucccgcgccgcgcgcggcaccaucggcgcgcgccgcaccggacaaccccuaaaagaagaccccuccgccguccccgucuucuccgucgacuacggcgaacucgacuuccaauggcgcgaaaaaaccccggaaccccccgucccgugcguccccgaacaaacagaauacgcgaccaucgucuucccguccggcaugggcacauccucacccgcccgccgaggcuccgccgacggcccccgauccgcccaaccccuacgccccgaagacggccacugcuccuggccccucuaaggacuagugcaucacauuuaaaagcaucucagccuaccaugagaauaagagaaagaaaaugaagaucaauagcuuauucaucucuuuuucuuuuucguugguguaaagccaacacccugucuaaaaaacauaaauuucuuuaaucauuuugccucuuuucucugugcuucaauuaauaaaaaauggaaagaaccuagaucuaaaaaaaaaaaaaaaaaaaaaaaaaaaaaaaaaaaaaaaaaaaaaaaaaaaaaaaaaaaaaaaaugcaucccccccccccccccccccccccccccccccaaaggcucuuuucagagccaccagaauu

SEQ ID NO: 398 - RNA, 832 nt, Artificial Sequence
  PDCD1(1-149) mRNA product TOP UTR opt10
ggggcgcugccuacggagguggcagccaucuccuucucggcaucaagcuuaccaugcaaaucccccaagcccccuggccggucgucugggccguccuccaacucggcuggcgccccggaugguuccucgacucccccgaccgcccguggaacccccccaccuucucccccgcccuccuagucgucaccgaaggcgacaacgccaccuucaccuguuccuucuccaacaccucagaauccuucguccucaacugguaccgcaugucccccuccaaccaaaccgacaaacucgccgccuuccccgaagaccgaucccaacccggccaagacugccgcuuccgcgucacacaacuucccaacggacgcgacuuucacauguccgucguccgcgcccgccgcaacgacuccggcaccuaccucugcggcgccaucucccucgcccccaaagcccaaaucaaagaaucccucagagccgaacuccgcgucaccgaacggcgcgccuaaggacuagugcaucacauuuaaaagcaucucagccuaccaugagaauaagagaaagaaaaugaagaucaauagcuuauucaucucuuuuucuuuuucguugguguaaagccaacacccugucuaaaaaacauaaauuucuuuaaucauuuugccucuuuucucugugcuucaauuaauaaaaaauggaaagaaccuagaucuaaaaaaaaaaaaaaaaaaaaaaaaaaaaaaaaaaaaaaaaaaaaaaaaaaaaaaaaaaaaaaaaugcaucccccccccccccccccccccccccccccccaaaggcucuuuucagagccaccagaauu

SEQ ID NO: 399 - RNA, 1042 nt, Artificial Sequence
  IL12A mRNA product TOP UTR opt10
ggggcgcugccuacggagguggcagccaucuccuucucggcaucaagcuuaccaugugccccgcccguucacuccuccucgucgccacccucguccuccuagaccaccucucccuggcccgcaaccucccagucgccacccccgaccccggcauguuccccugccuccaccacucccaaaaccuccuccgcgccgucuccaacaugcuccaaaaagcccgccaaacccucgaauuuuaccccugcaccuccgaagagaucgaccacgaagacaucaccaaagacaaaaccuccacagucgaagccugccucccccucgaacucaccaaaaacgaauccugccuuaacucccgcgaaaccuccuucaucaccaacggcuccugccucgccucccgcaaaaccuccuucaugauggcccucugccucuccuccaucuacgaagaccucaaaauguaccaagucgaauuuaaaaccaugaacgccaaacuccucauggaccccaaacgccaaaucuuccucgaccaaaacaugcucgccgucaucgacgaacucaugcaagcccucaacuucaacuccgaaaccgucccccaaaaauccucccucgaagaacccgacuucuacaaaaccaaaaucaaacuuugcauccuccuccacgcauuccgcauccgcgccgucaccaucgaccgugucaugagcuaccuaaacgccuccugaggacuagugcaucacauuuaaaagcaucucagccuaccaugagaauaagagaaagaaaaugaagaucaauagcuuauucaucucuuuuucuuuuucguugguguaaagccaacacccugucuaaaaaacauaaauuucuuuaaucauuuugccucuuuucucugugcuucaauuaauaaaaaauggaaagaaccuagaucuaaaaaaaaaaaaaaaaaaaaaaaaaaaaaaaaaaaaaaaaaaaaaaaaaaaaaaaaaaaaaaaaugcaucccccccccccccccccccccccccccccccaaaggcucuuuucagagccaccagaauu

SEQ ID NO: 400 - RNA, 1039 nt, Artificial Sequence
  IL12A(1-219) mRNA product TOP UTR opt10
ggggcgcugccuacggagguggcagccaucuccuucucggcaucaagcuuaccaugugccccgcccguucacuccuccucgucgccacccucguccuccuagaccaccucucccuggcccgcaaccucccagucgccacccccgaccccggcauguuccccugccuccaccacucccaaaaccuccuccgcgccgucuccaacaugcuccaaaaagcccgccaaacccucgaauuuuaccccugcaccuccgaagagaucgaccacgaagacaucaccaaagacaaaaccuccacagucgaagccugccucccccucgaacucaccaaaaacgaauccugccuuaacucccgcgaaaccuccuucaucaccaacggcuccugccucgccucccgcaaaaccuccuucaugauggcccucugccucuccuccaucuacgaagaccucaaaauguaccaagucgaauuuaaaaccaugaacgccaaacuccucauggaccccaaacgccaaaucuuccucgaccaaaacaugcucgccgucaucgacgaacucaugcaagcccucaacuucaacuccgaaaccgucccccaaaaauccucccucgaagaacccgacuucuacaaaaccaaaaucaaacuuugcauccuccuccacgcauuccgcauccgcgccgucaccaucgaccgugucaugagcuaccuaaacgccuccggacuagugcaucacauuuaaaagcaucucagccuaccaugagaauaagagaaagaaaaugaagaucaauagcuuauucaucucuuuuucuuuuucguugguguaaagccaacacccugucuaaaaaacauaaauuucuuuaaucauuuugccucuuuucucugugcuucaauuaauaaaaaauggaaagaaccuagaucuaaaaaaaaaaaaaaaaaaaaaaaaaaaaaaaaaaaaaaaaaaaaaaaaaaaaaaaaaaaaaaaaugcaucccccccccccccccccccccccccccccccaaaggcucuuuucagagccaccagaauu

SEQ ID NO: 401 - RNA, 976 nt, Artificial Sequence
  IL12A(23-219) mRNA product TOP UTR opt10
ggggcgcugccuacggagguggcagccaucuccuucucggcaucaagcuuacccgcaaccucccagucgccacccccgaccccggcauguuccccugccuccaccacucccaaaaccuccuccgcgccgucuccaacaugcuccaaaaagcccgccaaacccucgaauuuuaccccugcaccuccgaagagaucgaccacgaagacaucaccaaagacaaaaccuccacagucgaagccugccucccccucgaacucaccaaaaacgaauccugccuuaacucccgcgaaaccuccuucaucaccaacggcuccugccucgccucccgcaaaaccuccuucaugauggcccucugccucuccuccaucuacgaagaccucaaaauguaccaagucgaauuuaaaaccaugaacgccaaacuccucauggaccccaaacgccaaaucuuccucgaccaaaacaugcucgccgucaucgacgaacucaugcaagcccucaacuucaacuccgaaaccgucccccaaaaauccucccucgaagaacccgacuucuacaaaaccaaaaucaaacuuugcauccuccuccacgcauuccgcauccgcgccgucaccaucgaccgugucaugagcuaccuaaacgccuccugaggacuagugcaucacauuuaaaagcaucucagccuaccaugagaauaagagaaagaaaaugaagaucaauagcuuauucaucucuuuuucuuuuucguugguguaaagccaacacccugucuaaaaaacauaaauuucuuuaaucauuuugccucuuuucucugugcuucaauuaauaaaaaauggaaagaaccuagaucuaaaaaaaaaaaaaaaaaaaaaaaaaaaaaaaaaaaaaaaaaaaaaaaaaaaaaaaaaaaaaaaaugcaucccccccccccccccccccccccccccccccaaaggcucuuuucagagccaccagaauu

SEQ ID NO: 402 - RNA, 1369 nt, Artificial Sequence
  IL12B mRNA product TOP UTR opt10
ggggcgcugccuacggagguggcagccaucuccuucucggcaucaagcuuaccaugugccaccaacaacucgucaucuccugguucucccucgucuuccuagccuccccacucgucgccaucugggaacucaaaaaagacguauacgucgucgaacucgacugguaccccgacgccccaggagaaauggucguccuaaccugcgacacacccgaagaagacgguaucaccuggacccucgaccaauccuccgaaguccuaggcuccggcaagacccucaccauccaagucaaagaauuuggcgacgcaggacaauacaccugucacaaaggcggcgaaguccucagccacagccuucuccuacuccauaaaaaagaagacggcaucugguccacugacauccucaaagaccaaaaagaacccaaaaauaaaaccuuccuccgcugcgaagccaaaaacuacuccggccgauucaccuguugguggcuaaccacaaucagcaccgaccucaccuucucagucaaauccucccgcggcucaucugacccccaaggcgucacaugcggcgccgccacccucuccgccgaacgcguccgcggcgacaacaaagaauacgaauacuccgucgaaugucaagaagacuccgccugccccgccgccgaagaaucacuccccaucgaagucauggucgacgcaguccacaaacucaaauacgaaaacuacaccuccuccuucuucauccgcgacauaauaaaacccgacccacccaaaaaccuccaacucaagccacucaaaaacucccgacaagucgaagucuccugggaguaccccgacaccugguccacaccacacuccuacuucucccucaccuucugcguccaaguccaaggcaaauccaaacgcgaaaaaaaagaccgcguuuucacagacaaaaccuccgccacaguaauaugccgcaaaaacgccuccaucuccguccgggcccaagaccgcuacuacuccuccuccugguccgagugggccucaguccccugcagcuaaggacuagugcaucacauuuaaaagcaucucagccuaccaugagaauaagagaaagaaaaugaagaucaauagcuuauucaucucuuuuucuuuuucguugguguaaagccaacacccugucuaaaaaacauaaauuucuuuaaucauuuugccucuuuucucugugcuucaauuaauaaaaaauggaaagaaccuagaucuaaaaaaaaaaaaaaaaaaaaaaaaaaaaaaaaaaaaaaaaaaaaaaaaaaaaaaaaaaaaaaaaugcaucccccccccccccccccccccccccccccccaaaggcucuuuucagagccaccagaauu

SEQ ID NO: 403 - RNA, 1366 nt, Artificial Sequence
  IL12B(1-328) mRNA product TOP UTR opt10
ggggcgcugccuacggagguggcagccaucuccuucucggcaucaagcuuaccaugugccaccaacaacucgucaucuccugguucucccucgucuuccuagccuccccacucgucgccaucugggaacucaaaaaagacguauacgucgucgaacucgacugguaccccgacgccccaggagaaauggucguccuaaccugcgacacacccgaagaagacgguaucaccuggacccucgaccaauccuccgaaguccuaggcuccggcaagacccucaccauccaagucaaagaauuuggcgacgcaggacaauacaccugucacaaaggcggcgaaguccucagccacagccuucuccuacuccauaaaaaagaagacggcaucugguccacugacauccucaaagaccaaaaagaacccaaaaauaaaaccuuccuccgcugcgaagccaaaaacuacuccggccgauucaccuguugguggcuaaccacaaucagcaccgaccucaccuucucagucaaauccucccgcggcucaucugacccccaaggcgucacaugcggcgccgccacccucuccgccgaacgcguccgcggcgacaacaaagaauacgaauacuccgucgaaugucaagaagacuccgccugccccgccgccgaagaaucacuccccaucgaagucauggucgacgcaguccacaaacucaaauacgaaaacuacaccuccuccuucuucauccgcgacauaauaaaacccgacccacccaaaaaccuccaacucaagccacucaaaaacucccgacaagucgaagucuccugggaguaccccgacaccugguccacaccacacuccuacuucucccucaccuucugcguccaaguccaaggcaaauccaaacgcgaaaaaaaagaccgcguuuucacagacaaaaccuccgccacaguaauaugccgcaaaaacgccuccaucuccguccgggcccaagaccgcuacuacuccuccuccugguccgagugggccucaguccccugcagcggacuagugcaucacauuuaaaagcaucucagccuaccaugagaauaagagaaagaaaaugaagaucaauagcuuauucaucucuuuuucuuuuucguugguguaaagccaacacccugucuaaaaaacauaaauuucuuuaaucauuuugccucuuuucucugugcuucaauuaauaaaaaauggaaagaaccuagaucuaaaaaaaaaaaaaaaaaaaaaaaaaaaaaaaaaaaaaaaaaaaaaaaaaaaaaaaaaaaaaaaaugcaucccccccccccccccccccccccccccccccaaaggcucuuuucagagccaccagaauu

SEQ ID NO: 404 - RNA, 1303 nt, Artificial Sequence
  IL12B(23-328) mRNA product TOP UTR opt10
ggggcgcugccuacggagguggcagccaucuccuucucggcaucaagcuuaccaucugggaacucaaaaaagacguauacgucgucgaacucgacugguaccccgacgccccaggagaaauggucguccuaaccugcgacacacccgaagaagacgguaucaccuggacccucgaccaauccuccgaaguccuaggcuccggcaagacccucaccauccaagucaaagaauuuggcgacgcaggacaauacaccugucacaaaggcggcgaaguccucagccacagccuucuccuacuccauaaaaaagaagacggcaucugguccacugacauccucaaagaccaaaaagaacccaaaaauaaaaccuuccuccgcugcgaagccaaaaacuacuccggccgauucaccuguugguggcuaaccacaaucagcaccgaccucaccuucucagucaaauccucccgcggcucaucugacccccaaggcgucacaugcggcgccgccacccucuccgccgaacgcguccgcggcgacaacaaagaauacgaauacuccgucgaaugucaagaagacuccgccugccccgccgccgaagaaucacuccccaucgaagucauggucgacgcaguccacaaacucaaauacgaaaacuacaccuccuccuucuucauccgcgacauaauaaaacccgacccacccaaaaaccuccaacucaagccacucaaaaacucccgacaagucgaagucuccugggaguaccccgacaccugguccacaccacacuccuacuucucccucaccuucugcguccaaguccaaggcaaauccaaacgcgaaaaaaaagaccgcguuuucacagacaaaaccuccgccacaguaauaugccgcaaaaacgccuccaucuccguccgggcccaagaccgcuacuacuccuccuccugguccgagugggccucaguccccugcagcuaaggacuagugcaucacauuuaaaagcaucucagccuaccaugagaauaagagaaagaaaaugaagaucaauagcuuauucaucucuuuuucuuuuucguugguguaaagccaacacccugucuaaaaaacauaaauuucuuuaaucauuuugccucuuuucucugugcuucaauuaauaaaaaauggaaagaaccuagaucuaaaaaaaaaaaaaaaaaaaaaaaaaaaaaaaaaaaaaaaaaaaaaaaaaaaaaaaaaaaaaaaaugcaucccccccccccccccccccccccccccccccaaaggcucuuuucagagccaccagaauu

SEQ ID NO: 405 - RNA, 436 nt, Artificial Sequence; identical to SEQ ID NO: 394
  Linker-sFvCC49-218 mRNA product TOP UTR opt10

SEQ ID NO: 406 - RNA, 2014 nt, Artificial Sequence
  IL12 mRNA product TOP UTR opt10
ggggcgcugccuacggagguggcagccaucuccuucucggcaucaagcuuaccaugugccaccaacaacucgucaucuccugguucucccucgucuuccuagccuccccacucgucgccaucugggaacucaaaaaagacguauacgucgucgaacucgacugguaccccgacgccccaggagaaauggucguccuaaccugcgacacacccgaagaagacgguaucaccuggacccucgaccaauccuccgaaguccuaggcuccggcaagacccucaccauccaagucaaagaauuuggcgacgcaggacaauacaccugucacaaaggcggcgaaguccucagccacagccuucuccuacuccauaaaaaagaagacggcaucugguccacugacauccucaaagaccaaaaagaacccaaaaauaaaaccuuccuccgcugcgaagccaaaaacuacuccggccgauucaccuguugguggcuaaccacaaucagcaccgaccucaccuucucagucaaauccucccgcggcucaucugacccccaaggcgucacaugcggcgccgccacccucuccgccgaacgcguccgcggcgacaacaaagaauacgaauacuccgucgaaugucaagaagacuccgccugccccgccgccgaagaaucacuccccaucgaagucauggucgacgcaguccacaaacucaaauacgaaaacuacaccuccuccuucuucauccgcgacauaauaaaacccgacccacccaaaaaccuccaacucaagccacucaaaaacucccgacaagucgaagucuccugggaguaccccgacaccugguccacaccacacuccuacuucucccucaccuucugcguccaaguccaaggcaaauccaaacgcgaaaaaaaagaccgcguuuucacagacaaaaccuccgccacaguaauaugccgcaaaaacgccuccaucuccguccgggcccaagaccgcuacuacuccuccuccugguccgagugggccucaguccccugcagcgggaguacgagugggagugggaagccggggaguggggaggggaguacgaaggggcgcaaccucccagucgccacccccgaccccggcauguuccccugccuccaccacucccaaaaccuccuccgcgccgucuccaacaugcuccaaaaagcccgccaaacccucgaauuuuaccccugcaccuccgaagagaucgaccacgaagacaucaccaaagacaaaaccuccacagucgaagccugccucccccucgaacucaccaaaaacgaauccugccuuaacucccgcgaaaccuccuucaucaccaacggcuccugccucgccucccgcaaaaccuccuucaugauggcccucugccucuccuccaucuacgaagaccucaaaauguaccaagucgaauuuaaaaccaugaacgccaaacuccucauggaccccaaacgccaaaucuuccucgaccaaaacaugcucgccgucaucgacgaacucaugcaagcccucaacuucaacuccgaaaccgucccccaaaaauccucccucgaagaacccgacuucuacaaaaccaaaaucaaacuuugcauccuccuccacgcauuccgcauccgcgccgucaccaucgaccgugucaugagcuaccuaaacgccuccugaggacuagugcaucacauuuaaaagcaucucagccuaccaugagaauaagagaaagaaaaugaagaucaauagcuuauucaucucuuuuucuuuuucguugguguaaagccaacacccugucuaaaaaacauaaauuucuuuaaucauuuugccucuuuucucugugcuucaauuaauaaaaaauggaaagaaccuagaucuaaaaaaaaaaaaaaaaaaaaaaaaaaaaaaaaaaaaaaaaaaaaaaaaaaaaaaaaaaaaaaaaugcaucccccccccccccccccccccccccccccccaaaggcucuuuucagagccaccagaauu

SEQ ID NO: 407 - RNA, 1168 nt, Artificial Sequence
  CD40LG mRNA product TOP UTR opt10
ggggcgcugccuacggagguggcagccaucuccuucucggcaucaagcuuaccaugaucgaaaccuacaaucaaaccuccccccgcagcgccgcaacaggccuccccaucuccaugaaaaucuucauguaccuccucaccgucuuccuaaucacccaaaugaucggcuccgcccuauucgccgucuaccuccaccgccgccucgacaaaaucgaagacgaacgcaaccuccacgaagacuuugucuucaugaaaacuauccaacgaugcaacaccggcgaacgaucccuaucccuccucaacugcgaagaaauaaaaucccaauucgaaggauucgucaaagacaucaugcuaaacaaagaagaaaccaaaaaagaaaacuccuucgaaaugcaaaaaggcgaccaaaacccccaaaucgcagcccacgucaucucagaagcaucuuccaaaaccaccuccguccuccaaugggccgaaaaaggcuacuacaccaugucaaacaaccucgucacccucgaaaacggcaaacaacucaccgucaaacgccaaggccucuacuacaucuacgcacaagucaccuucugcuccaaccgcgaagcauccucccaagcccccuucaucgccucccucugccucaaaucccccggccgcuucgaacgcauccuccuccgcgccgcaaauacccacuccuccgccaaaccaugcggccaacaauccauccaccucggcggcgucuucgaacuccaacccggcgccuccgucuucgucaacgucaccgaccccucccaaguaucccauggaaccggcuucaccuccuucggccuccucaaacucuagggacuagugcaucacauuuaaaagcaucucagccuaccaugagaauaagagaaagaaaaugaagaucaauagcuuauucaucucuuuuucuuuuucguugguguaaagccaacacccugucuaaaaaacauaaauuucuuuaaucauuuugccucuuuucucugugcuucaauuaauaaaaaauggaaagaaccuagaucuaaaaaaaaaaaaaaaaaaaaaaaaaaaaaaaaaaaaaaaaaaaaaaaaaaaaaaaaaaaaaaaaugcaucccccccccccccccccccccccccccccccaaaggcucuuuucagagccaccagaauu

SEQ ID NO: 408 - DNA, 42 bp, Artificial Sequence
  5-UTR of human ribosomal protein Large 32 lacking the 5 terminal oligopyrimidine tract
ggcgctgcctacggaggtggcagccatctccttctcggcatc

SEQ ID NO: 409 - RNA, 42 nt, Artificial Sequence
  5-UTR of human ribosomal protein Large 32 lacking the 5 terminal oligopyrimidine tract mRNA
ggcgcugccuacggagguggcagccaucuccuucucggcauc

SEQ ID NO: 410 - DNA, 75 bp, Artificial Sequence
  5-UTR of human mitochondrial ATP synthase subunit alpha lacking the 5 terminal oligopyrimidine tract
gcggctcggccattttgtcccagtcagtccggaggctgcggctgcagaagtaccgcctgcggagtaactgcaaag

SEQ ID NO: 411 - RNA, 75 nt, Artificial Sequence
  5-UTR of human mitochondrial ATP synthase subunit alpha lacking the 5 terminal oligopyrimidine tract mRNA
gcggcucggccauuuugucccagucaguccggaggcugcggcugcagaaguaccgccugcggaguaacugcaaag

SEQ ID NO: 412 - DNA, 110 bp, Artificial Sequence
  3-UTR of Homo sapiens hemoglobin, alpha 1 (HBA1)
gctggagcctcggtggccatgcttcttgccccttgggcctccccccagcccctcctccccttcctgcacccgtacccccgtggtctttgaataaagtctgagtgggcggc

SEQ ID NO: 413 - RNA, 110 nt, Artificial Sequence
  3-UTR of Homo sapiens hemoglobin, alpha 1 (HBA1) mRNA
gcuggagccucgguggccaugcuucuugccccuugggccuccccccagccccuccuccccuuccugcacccguacccccguggucuuugaauaaagucugagugggcggc

SEQ ID NO: 414 - DNA, 108 bp, Artificial Sequence
  3-UTR of Homo sapiens hemoglobin, alpha 2 (HBA2)
gctggagcctcggtagccgttcctcctgcccgctgggcctcccaacgggccctcctcccctccttgcaccggcccttcctggtctttgaataaagtctgagtgggcag

SEQ ID NO: 415 - RNA, 108 nt, Artificial Sequence
  3-UTR of Homo sapiens hemoglobin, alpha 2 (HBA2) mRNA
gcuggagccucgguagccguuccuccugcccgcugggccucccaacgggcccuccuccccuccuugcaccggcccuuccuggucuuugaauaaagucugagugggcag

SEQ ID NO: 416 - DNA, 132 bp, Artificial Sequence
  3-UTR of Homo sapiens hemoglobin, beta (HBB)
gctcgctttcttgctgtccaatttctattaaaggttcctttgttccctaagtccaactactaaactgggggatattatgaagggccttgagcatctggattctgcctaataaaaaacatttattttcattgc

SEQ ID NO: 417 - RNA, 132 nt, Artificial Sequence
  3-UTR of Homo sapiens hemoglobin, beta (HBB) mRNA
gcucgcuuucuugcuguccaauuucuauuaaagguuccuuuguucccuaaguccaacuacuaaacugggggauauuaugaagggccuugagcaucuggauucugccuaauaaaaaacauuuauuuucauugc

SEQ ID NO: 418 - DNA, 44 bp, Artificial Sequence
  Center, alpha-complex-binding portion of the 3UTR of an alpha-globin gene (muag)
gcccgatgggcctcccaacgggccctcctcccctccttgcaccg

SEQ ID NO: 419 - RNA, 44 nt, Artificial Sequence
  Center, alpha-complex-binding portion of the 3UTR of an alpha-globin gene (muag) mRNA
gcccgaugggccucccaacgggcccuccuccccuccuugcaccg

SEQ ID NO: 420 - DNA, 186 bp, Artificial Sequence
  3-UTR of human albumin
catcacatttaaaagcatctcagcctaccatgagaataagagaaagaaaatgaagatcaaaagcttattcatctgtttttctttttcgttggtgtaaagccaacaccctgtctaaaaaacataaatttctttaatcattttgcctcttttctctgtgcttcaattaataaaaaatggaaagaatct

SEQ ID NO: 421 - RNA, 186 nt, Artificial Sequence
  3-UTR of human albumin mRNA
caucacauuuaaaagcaucucagccuaccaugagaauaagagaaagaaaaugaagaucaaaagcuuauucaucuguuuuucuuuuucguugguguaaagccaacacccugucuaaaaaacauaaauuucuuuaaucauuuugccucuuuucucugugcuucaauuaauaaaaaauggaaagaaucu

SEQ ID NO: 422 - DNA, 186 bp, Artificial Sequence
  3-UTR albumin7
catcacatttaaaagcatctcagcctaccatgagaataagagaaagaaaatgaagatcaatagcttattcatctctttttctttttcgttggtgtaaagccaacaccctgtctaaaaaacataaatttctttaatcattttgcctcttttctctgtgcttcaattaataaaaaatggaaagaacct

SEQ ID NO: 423 - RNA, 186 nt, Artificial Sequence
  3-UTR albumin7 mRNA
caucacauuuaaaagcaucucagccuaccaugagaauaagagaaagaaaaugaagaucaauagcuuauucaucucuuuuucuuuuucguugguguaaagccaacacccugucuaaaaaacauaaauuucuuuaaucauuuugccucuuuucucugugcuucaauuaauaaaaaauggaaagaaccu

SEQ ID NO: 424 - DNA, 187 bp, Artificial Sequence
  3-UTR ALB7
gcatcacatttaaaagcatctcagcctaccatgagaataagagaaagaaaatgaagatcaatagcttattcatctctttttctttttcgttggtgtaaagccaacaccctgtctaaaaaacataaatttctttaatcattttgcctcttttctctgtgcttcaattaataaaaaatggaaagaacct

SEQ ID NO: 425 - RNA, 187 nt, Artificial Sequence
  3-UTR ALB7 mRNA
gcaucacauuuaaaagcaucucagccuaccaugagaauaagagaaagaaaaugaagaucaauagcuuauucaucucuuuuucuuuuucguugguguaaagccaacacccugucuaaaaaacauaaauuucuuuaaucauuuugccucuuuucucugugcuucaauuaauaaaaaauggaaagaaccu

SEQ ID NO: 426 - DNA, 24 bp, Artificial Sequence
  histone stem-loop sequence
caaaggctcttttcagagccacca

SEQ ID NO: 427 - RNA, 24 nt, Artificial Sequence
  histone stem-loop sequence mRNA
caaaggcucuuuucagagccacca

SEQ ID NO: 428 - DNA, 13 bp, Artificial Sequence
  Kozak
gccgccaccatgg

SEQ ID NO: 429 - RNA, 13 nt, Artificial Sequence
  Kozak mRNA
gccgccaccaugg

SEQ ID NO: 430 - RNA, 2023 nt, Artificial Sequence
  R2763 MmIL-12 mRNA product TOP UTR opt1
ggggcgcugccuacggagguggcagccaucuccuucucggcaucaagcuuaccaugugcccccagaagcugaccaucagcugguucgccaucgugcuccuggucuccccgcugauggccaugugggagcucgagaaggacguguacguggucgagguggacuggacccccgacgcgcccggcgagacggugaaccugaccugcgacacccccgaggaggacgacaucaccuggacgagcgaccagcggcacggggucaucggcuccgggaagacccugaccaucaccgugaaggaguuccucgacgccggccaguacacgugccacaagggcggcgagacccugagccacucccaccugcuccugcacaagaaggagaacgggaucuggagcaccgagauccugaagaacuucaagaacaagaccuuccucaagugcgaggccccgaacuacuccgggcgcuucacgugcagcuggcuggugcagcggaacauggaccugaaguucaacaucaaguccagcuccagcucccccgacagccgcgccgucaccugcggcauggccucccucagcgcggagaaggugacccuggaccagcgggacuacgagaaguacuccgugagcugccaggaggacgucaccugccccacggccgaggagacccugcccaucgagcucgcccuggaggcccgccagcagaacaaguacgagaacuacuccaccagcuucuucauccgggacaucaucaagccggacccccccaagaaccugcagaugaagccccucaagaacagccagguggagguguccugggaguacccggacagcugguccaccccgcacagcuacuucucccugaaguucuucguccgcauccagcggaagaaggagaagaugaaggagacggaggaggggugcaaccagaagggcgcguuccugguggagaagaccagcaccgaggugcagugcaagggcgggaacgucugcgugcaggcccaggaccgguacuacaacuccagcugcuccaagugggccugcgugcccugccggguccgcagcggcaguacuucgggcagugguaagccugguaguggugaggguaguacuaagggucgcgugauccccgucagcggcccggcccggugccugucccagagccgcaaccugcucaagaccacggacgacauggugaagaccgcccgggagaagcugaagcacuacuccugcaccgccgaggacaucgaccacgaggacaucacccgcgaccagacgagcacccugaagaccugccucccccuggagcugcacaagaacgaguccugccucgccacccgggagacgagcuccaccacccgcgggagcugccugccgccccagaagaccucccugaugaugacgcucugccugggcagcaucuacgaggaccugaagauguaccagaccgaguuccaggcgaucaacgccgcccuccagaaccacaaccaccagcagaucauccuggacaaggggaugcugguggccaucgacgagcucaugcagucccugaaccacaacggcgagacccugcggcagaagccgcccgucggggaggcggaccccuaccgcgugaagaugaagcucugcauccugcugcacgccuucagcacccggguggucacgaucaaccgcgugaugggcuaccucuccagcgccugaggacuagugcaucacauuuaaaagcaucucagccuaccaugagaauaagagaaagaaaaugaagaucaauagcuuauucaucucuuuuucuuuuucguugguguaaagccaacacccugucuaaaaaacauaaauuucuuuaaucauuuugccucuuuucucugugcuucaauuaauaaaaaauggaaagaaccuagaucuaaaaaaaaaaaaaaaaaaaaaaaaaaaaaaaaaaaaaaaaaaaaaaaaaaaaaaaaaaaaaaaaugcaucccccccccccccccccccccccccccccccaaaggcucuuuucagagccaccagaauu

SEQ ID NO: 431 - RNA, 856 nt, Artificial Sequence
  R3971 MmPdcd1(1-157,C83S) mRNA product TOP UTR opt1
ggggcgcugccuacggagguggcagccaucuccuucucggcaucaagcuuaccaugugggugcgccagguccccuggagcuucaccugggccgugcugcagcucuccuggcagagcggcuggcugcuggaggugccgaacgggcccuggcggucccucaccuucuaccccgccuggcugacggucagcgagggcgcgaacgccaccuucaccugcucccugagcaacugguccgaggaccucaugcugaacuggaaccgccugagccccuccaaccagaccgagaagcaggccgccuucagcaacgggcucucccagccggugcaggacgcccgguuccagaucauccagcugcccaaccgccacgacuuccacaugaacauccuggacacgcggcgcaacgacagcggcaucuaccucugcggggcgaucucccugcaccccaaggccaagaucgaggagagccccggcgccgagcugguggucaccgagcggauccucgagaccuccacccgcuacccgagcugaggacuagugcaucacauuuaaaagcaucucagccuaccaugagaauaagagaaagaaaaugaagaucaauagcuuauucaucucuuuuucuuuuucguugguguaaagccaacacccugucuaaaaaacauaaauuucuuuaaucauuuugccucuuuucucugugcuucaauuaauaaaaaauggaaagaaccuagaucuaaaaaaaaaaaaaaaaaaaaaaaaaaaaaaaaaaaaaaaaaaaaaaaaaaaaaaaaaaaaaaaaugcaucccccccccccccccccccccccccccccccaaaggcucuuuucagagccaccagaauu

SEQ ID NO: 432 - RNA, 1165 nt, Artificial Sequence
  R3571 MmCd40lg mRNA product TOP UTR opt1
ggggcgcugccuacggagguggcagccaucuccuucucggcaucaagcuuaccaugaucgagaccuacagccagcccuccccgcggagcguggccaccggccugcccgccuccaugaagaucuucauguaccuccugacggucuuccugaucacccagaugaucgggagcgugcucuucgcgguguaccugcaccgccggcuggacaaggucgaggaggaggugaaccuccacgaggacuucguguucaucaagaagcugaagcgcugcaacaagggcgaggggucccugagccuccugaacugcgaggagaugcggcgccaguucgaggaccuggucaaggacaucacccucaacaaggaggagaagaaggagaacuccuucgagaugcagcggggcgacgaggacccccagaucgccgcccacguggugagcgaggccaacuccaacgccgcgagcguccugcagugggccaagaagggguacuacaccaugaaguccaaccuggugaugcucgagaacggcaagcagcugacggugaagcgcgagggccuguacuacgucuacacccaggugaccuucugcagcaaccgggagcccuccagccagcgcccguucaucguggggcucuggcugaagcccuccagcggcuccgagcggauccugcucaaggccgccaacacccacagcuccagccagcugugcgagcagcagagcguccaccugggcggcguguucgagcuccaggcgggggccuccguguucgucaacgugacggaggccagccaggugauccaccgcgucggguucuccagcuucggccugcugaagcucugaggacuagugcaucacauuuaaaagcaucucagccuaccaugagaauaagagaaagaaaaugaagaucaauagcuuauucaucucuuuuucuuuuucguugguguaaagccaacacccugucuaaaaaacauaaauuucuuuaaucauuuugccucuuuucucugugcuucaauuaauaaaaaauggaaagaaccuagaucuaaaaaaaaaaaaaaaaaaaaaaaaaaaaaaaaaaaaaaaaaaaaaaaaaaaaaaaaaaaaaaaaugcaucccccccccccccccccccccccccccccccaaaggcucuuuucagagccaccagaauu

SEQ ID NO: 433 - RNA, 547 nt, Artificial Sequence
  R2025/R2391
gggagaaagcucaagcuuauccaaguaggcuggucaccuguacaacguagccgguauuuuuuuuuuuuuuuuuuuuuugaccgucucaagguccaaguuagucugccuauaaaggugcggauccacagcugaugaaagacuugugcgguacgguuaaucuccccuuuuuuuuuuuuuuuuuuuuuaguaaaugcgucuacugaauccagcgaugaugcuggcccagaucuucgaccacaagugcauauaguagucaucgagggucgccuuuuuuuuuuuuuuuuuuuuuuuggcccaguucugagacuucgcuagagacuacaguuacagcugcaguaguaaccacugcggcuauugcaggaaaucccguucagguuuuuuuuuuuuuuuuuuuuuccgcucacuaugauuaagaaccagguggagugucacugcucucgaggucucacgagagcgcucgauacaguccuuggaagaaucuuuuuuuuuuuuuuuuuuuuuugugcgacgaucacagagaacuucuauucaugcaggucugcucuag

SEQ ID NO: 434 - RNA, 547 nt, Artificial Sequence
  R3630/R3631
gggagaaagcucaagcuuauccaaguaggcuggucaccuguacaacguagccgguauuuuuuuuuuuuuuuuuuuuuugaccgucucaagguccaaguuagucugccuauaaaggugcggauccacagcugaugaaagacuugugcgguacgguuaaucuccccuuuuuuuuuuuuuuuuuuuuuaguaaaugcgucuacugaauccagcgaugaugcuggcccagaucuucgaccacaagugcauauaguagucaucgagggucgccuuuuuuuuuuuuuuuuuuuuuuuggcccaguucugagacuucgcuagagacuacaguuacagcugcaguaguaaccacugcggcuauugcaggaaaucccguucagguuuuuuuuuuuuuuuuuuuuuccgcucacuaugauuaagaaccagguggagugucacugcucucgaggucucacgagagcgcucgauacagugcuuggaagaaucuuuuuuuuuuuuuuuuuuuuuugugcgacgaucacagagaacuucuauucaugcaggucugcucuag

SEQ ID NO: 435 - RNA, 546 nt, Artificial Sequence
  R722
gggagaaagcucaagcuuauccaaguaggcuggucaccuguacaacguagccgguauuuuuuuuuuuuuuuuuuuuuugaccgucucaagguccaaguuagucugccuauaaaggugcggauccacagcugaugaaagacuugugcgguacgguuaaucuccccuuuuuuuuuuuuuuuuuuuuuaguaaaugcgucuacugaauccagcgaugaugcuggcccagaucuucgaccacaagugcauauaguagucaucgagggucgccuuuuuuuuuuuuuuuuuuuuuuuggcccaguucugagacuucgcuagagacuacaguuacagcugcaguaguaaccacugcggcuauugcaggaaaucccguucagguuuuuuuuuuuuuuuuuuuuuccgcucacuaugauuaagaaccagguggagugucacugcucucgaggucucacgagagcgcucgauacaguccuuggaagaaucuuuuuuuuuuuuuuuuuuuuuugugcgacgaucacagagaacuucuauucaugcaggucugcucua

SEQ ID NO: 436 - RNA, 1083 nt, Artificial Sequence
  R723
gggagaaagcucaagcuuauccaaguaggcuggucaccuguacaacguagccgguauuuuuuuuuuuuuuuuuuuuuugaccgucucaagguccaaguuagucugccuauaaaggugcggauccacagcugaugaaagacuugugcgguacgguuaaucuccccuuuuuuuuuuuuuuuuuuuuuaguaaaugcgucuacugaauccagcgaugaugcuggcccagaucuucgaccacaagugcauauaguagucaucgagggucgccuuuuuuuuuuuuuuuuuuuuuuuggcccaguucugagacuucgcuagagacuacaguuacagcugcaguaguaaccacugcggcuauugcaggaaaucccguucagguuuuuuuuuuuuuuuuuuuuuccgcucacuaugauuaagaaccagguggagugucacugcucucgaggucucacgagagcgcucgauacaguccuuggaagaaucuuuuuuuuuuuuuuuuuuuuuugugcgacgaucacagagaacuucuauucaugcaggucugcucuagaacgaacugaccugacgccugaacuuaugagcgugcguauuuuuuuuuuuuuuuuuuuuuuuccucccaacaaaugucgaucaauagcugggcuguuggagacgcgucagcaaaugccguggcuccauaggacguguagacuucuauuuuuuuuuuuuuuuuuuuuucccgggaccacaaauaauauucuugcuugguugggcgcaagggccccguaucaggucauaaacggguacauguugcacaggcuccuuuuuuuuuuuuuuuuuuuuuuucgcugaguuauuccggucucaaaagacggcagacgucagucgacaacacggucuaaagcagugcuacaaucugccguguucguguuuuuuuuuuuuuuuuuuuugugaaccuacacggcgugcacuguaguucgcaauucauaggguaccggcucagaguuaugccuugguugaaaacugcccagcauacuuuuuuuuuuuuuuuuuuuucauauucccaugcuaagcaagggaugccgcgagucauguuaagcuugaauu

SEQ ID NO: 437 - RNA, 229 nt, Artificial Sequence
  R821
gggagaaagcucaagcuuauccaaguaggcuggucaccuguacaacguagccgguauuuuuuuuuuuuuuuuuuuuuugaccgucucaagguccaaguuagucugccuauaaaggugcggauccacagcugaugaaagacuugugcgguacgguuaaucuccccuuuuuuuuuuuuuuuuuuuuuaguaaaugcgucuacugaauccagcgaugaugcuggcccagauc

SEQ ID NO: 438 - RNA, 867 nt, Artificial Sequence
  PDCD1 CDS mRNA wild type
augcagaucccacaggcgcccuggccagucgucugggcggugcuacaacugggcuggcggccaggaugguucuuagacuccccagacaggcccuggaacccccccaccuucuccccagcccugcucguggugaccgaaggggacaacgccaccuucaccuguagcuucuccaacacaucggagagcuucgugcuaaacugguaccgcaugagccccagcaaccagacggacaagcuggccgcuuuccccgaggaccgcagccagcccggccaggacugccgcuuccgugucacacaacugcccaacgggcgugacuuccacaugagcguggucagggcccggcgcaaugacagcggcaccuaccucuguggggccaucucccuggcccccaaggcgcagaucaaagagagccugcgggcagagcucagggugacagagagaagggcagaagugcccacagcccaccccagccccucacccaggccagccggccaguuccaaacccuggugguuggugucgugggcggccugcugggcagccuggugcugcuagucuggguccuggccgucaucugcucccgggccgcacgagggacaauaggagccaggcgcaccggccagccccugaaggaggaccccucagccgugccuguguucucuguggacuauggggagcuggauuuccaguggcgagagaagaccccggagccccccgugcccugugucccugagcagacggaguaugccaccauugucuuuccuagcggaaugggcaccucaucccccgcccgcaggggcucagccgacggcccucggagugcccagccacugaggccugaggauggacacugcucuuggccccucuga

SEQ ID NO: 439 - RNA, 450 nt, Artificial Sequence
  PDCD1(1-149) CDS mRNA wild type
augcagaucccacaggcgcccuggccagucgucugggcggugcuacaacugggcuggcggccaggaugguucuuagacuccccagacaggcccuggaacccccccaccuucuccccagcccugcucguggugaccgaaggggacaacgccaccuucaccuguagcuucuccaacacaucggagagcuucgugcuaaacugguaccgcaugagccccagcaaccagacggacaagcuggccgcuuuccccgaggaccgcagccagcccggccaggacugccgcuuccgugucacacaacugcccaacgggcgugacuuccacaugagcguggucagggcccggcgcaaugacagcggcaccuaccucuguggggccaucucccuggcccccaaggcgcagaucaaagagagccugcgggcagagcucagggugacagagagaagggcauga

SEQ ID NO: 440 - RNA, 660 nt, Artificial Sequence
  IL12A CDS mRNA wild type
auguguccagcgcgcagccuccuccuuguggcuacccugguccuccuggaccaccucaguuuggccagaaaccuccccguggccacuccagacccaggaauguucccaugccuucaccacucccaaaaccugcugagggccgucagcaacaugcuccagaaggccagacaaacucuagaauuuuacccuugcacuucugaagagauugaucaugaagauaucacaaaagauaaaaccagcacaguggaggccuguuuaccauuggaauuaaccaagaaugagaguugccuaaauuccagagagaccucuuucauaacuaaugggaguugccuggccuccagaaagaccucuuuuaugauggcccugugccuuaguaguauuuaugaagacuugaagauguaccagguggaguucaagaccaugaaugcaaaacuucugauggauccuaagaggcagaucuuucuagaucaaaacaugcuggcaguuauugaugagcugaugcaggcccugaauuucaacagugagacugugccacaaaaauccucccuugaagaaccggauuuuuauaaaacuaaaaucaagcucugcauacuucuucaugcuuucagaauuagggcagugacuauugauagagugaugagcuaucugaaugcuuccuaa

SEQ ID NO: 441 - RNA, 657 nt, Artificial Sequence
  IL12A(1-219) CDS mRNA wild type
auguguccagcgcgcagccuccuccuuguggcuacccugguccuccuggaccaccucaguuuggccagaaaccuccccguggccacuccagacccaggaauguucccaugccuucaccacucccaaaaccugcugagggccgucagcaacaugcuccagaaggccagacaaacucuagaauuuuacccuugcacuucugaagagauugaucaugaagauaucacaaaagauaaaaccagcacaguggaggccuguuuaccauuggaauuaaccaagaaugagaguugccuaaauuccagagagaccucuuucauaacuaaugggaguugccuggccuccagaaagaccucuuuuaugauggcccugugccuuaguaguauuuaugaagacuugaagauguaccagguggaguucaagaccaugaaugcaaaacuucugauggauccuaagaggcagaucuuucuagaucaaaacaugcuggcaguuauugaugagcugaugcaggcccugaauuucaacagugagacugugccacaaaaauccucccuugaagaaccggauuuuuauaaaacuaaaaucaagcucugcauacuucuucaugcuuucagaauuagggcagugacuauugauagagugaugagcuaucugaaugcuucc

SEQ ID NO: 442 - RNA, 594 nt, Artificial Sequence
  IL12A(23-219) CDS mRNA wild type
agaaaccuccccguggccacuccagacccaggaauguucccaugccuucaccacucccaaaaccugcugagggccgucagcaacaugcuccagaaggccagacaaacucuagaauuuuacccuugcacuucugaagagauugaucaugaagauaucacaaaagauaaaaccagcacaguggaggccuguuuaccauuggaauuaaccaagaaugagaguugccuaaauuccagagagaccucuuucauaacuaaugggaguugccuggccuccagaaagaccucuuuuaugauggcccugugccuuaguaguauuuaugaagacuugaagauguaccagguggaguucaagaccaugaaugcaaaacuucugauggauccuaagaggcagaucuuucuagaucaaaacaugcuggcaguuauugaugagcugaugcaggcccugaauuucaacagugagacugugccacaaaaauccucccuugaagaaccggauuuuuauaaaacuaaaaucaagcucugcauacuucuucaugcuuucagaauuagggcagugacuauugauagagugaugagcuaucugaaugcuuccuaa

SEQ ID NO: 443 - RNA, 987 nt, Artificial Sequence
  IL12B CDS mRNA wild type
augugucaccagcaguuggucaucucuugguuuucccugguuuuucuggcaucuccccucguggccauaugggaacugaagaaagauguuuaugucguagaauuggauugguauccggaugccccuggagaaauggugguccucaccugugacaccccugaagaagaugguaucaccuggaccuuggaccagagcagugaggucuuaggcucuggcaaaacccugaccauccaagucaaagaguuuggagaugcuggccaguacaccugucacaaaggaggcgagguucuaagccauucgcuccugcugcuucacaaaaaggaagauggaauuugguccacugauauuuuaaaggaccagaaagaacccaaaaauaagaccuuucuaagaugcgaggccaagaauuauucuggacguuucaccuguugguggcugacgacaaucaguacugauuugacauucagugucaaaagcagcagaggcucaucugacccccaaggggugacgugcggagcugcuacacucucugcagagagagucagaggggacaacaaggaguaugaguacucaguggagugccaggaggacagugccugcccagcugcugaggagagucugcccauugaggucaugguggaugccguucacaagcucaaguaugaaaacuacaccagcagcuucuucaucagggacaucaucaaaccugacccacccaagaacuugcagcugaagccauuaaaaaauucucggcagguugaggucagcugggaguacccugacaccuggaguacuccacauuccuacuucucccugacauucugcguucagguccagggcaagagcaagagagaaaagaaagauagagucuucacggacaagaccucagccacggucaucugccgcaaaaaugccagcauuagcgugcgggcccaggaccgcuacuauagcucaucuuggagcgaaugggcaucugugcccugcaguuag

SEQ ID NO: 444 - RNA, 984 nt, Artificial Sequence
  IL12B(1-328) CDS mRNA wild type
augugucaccagcaguuggucaucucuugguuuucccugguuuuucuggcaucuccccucguggccauaugggaacugaagaaagauguuuaugucguagaauuggauugguauccggaugccccuggagaaauggugguccucaccugugacaccccugaagaagaugguaucaccuggaccuuggaccagagcagugaggucuuaggcucuggcaaaacccugaccauccaagucaaagaguuuggagaugcuggccaguacaccugucacaaaggaggcgagguucuaagccauucgcuccugcugcuucacaaaaaggaagauggaauuugguccacugauauuuuaaaggaccagaaagaacccaaaaauaagaccuuucuaagaugcgaggccaagaauuauucuggacguuucaccuguugguggcugacgacaaucaguacugauuugacauucagugucaaaagcagcagaggcucaucugacccccaaggggugacgugcggagcugcuacacucucugcagagagagucagaggggacaacaaggaguaugaguacucaguggagugccaggaggacagugccugcccagcugcugaggagagucugcccauugaggucaugguggaugccguucacaagcucaaguaugaaaacuacaccagcagcuucuucaucagggacaucaucaaaccugacccacccaagaacuugcagcugaagccauuaaaaaauucucggcagguugaggucagcugggaguacccugacaccuggaguacuccacauuccuacuucucccugacauucugcguucagguccagggcaagagcaagagagaaaagaaagauagagucuucacggacaagaccucagccacggucaucugccgcaaaaaugccagcauuagcgugcgggcccaggaccgcuacuauagcucaucuuggagcgaaugggcaucugugcccugcagu

SEQ ID NO: 445 - RNA, 921 nt, Artificial Sequence
  IL12B(23-328) CDS mRNA wild type
auaugggaacugaagaaagauguuuaugucguagaauuggauugguauccggaugccccuggagaaauggugguccucaccugugacaccccugaagaagaugguaucaccuggaccuuggaccagagcagugaggucuuaggcucuggcaaaacccugaccauccaagucaaagaguuuggagaugcuggccaguacaccugucacaaaggaggcgagguucuaagccauucgcuccugcugcuucacaaaaaggaagauggaauuugguccacugauauuuuaaaggaccagaaagaacccaaaaauaagaccuuucuaagaugcgaggccaagaauuauucuggacguuucaccuguugguggcugacgacaaucaguacugauuugacauucagugucaaaagcagcagaggcucaucugacccccaaggggugacgugcggagcugcuacacucucugcagagagagucagaggggacaacaaggaguaugaguacucaguggagugccaggaggacagugccugcccagcugcugaggagagucugcccauugaggucaugguggaugccguucacaagcucaaguaugaaaacuacaccagcagcuucuucaucagggacaucaucaaaccugacccacccaagaacuugcagcugaagccauuaaaaaauucucggcagguugaggucagcugggaguacccugacaccuggaguacuccacauuccuacuucucccugacauucugcguucagguccagggcaagagcaagagagaaaagaaagauagagucuucacggacaagaccucagccacggucaucugccgcaaaaaugccagcauuagcgugcgggcccaggaccgcuacuauagcucaucuuggagcgaaugggcaucugugcccugcaguuag

SEQ ID NO: 446 - RNA, 54 nt, Artificial Sequence; identical to SEQ ID NO: 20
  Linker-sFvCC49-218 CDS mRNA wild type

SEQ ID NO: 447 - RNA, 1632 nt, Artificial Sequence
  IL12 CDS mRNA wild type
augugucaccagcaguuggucaucucuugguuuucccugguuuuucuggcaucuccccucguggccauaugggaacugaagaaagauguuuaugucguagaauuggauugguauccggaugccccuggagaaauggugguccucaccugugacaccccugaagaagaugguaucaccuggaccuuggaccagagcagugaggucuuaggcucuggcaaaacccugaccauccaagucaaagaguuuggagaugcuggccaguacaccugucacaaaggaggcgagguucuaagccauucgcuccugcugcuucacaaaaaggaagauggaauuugguccacugauauuuuaaaggaccagaaagaacccaaaaauaagaccuuucuaagaugcgaggccaagaauuauucuggacguuucaccuguugguggcugacgacaaucaguacugauuugacauucagugucaaaagcagcagaggcucaucugacccccaaggggugacgugcggagcugcuacacucucugcagagagagucagaggggacaacaaggaguaugaguacucaguggagugccaggaggacagugccugcccagcugcugaggagagucugcccauugaggucaugguggaugccguucacaagcucaaguaugaaaacuacaccagcagcuucuucaucagggacaucaucaaaccugacccacccaagaacuugcagcugaagccauuaaaaaauucucggcagguugaggucagcugggaguacccugacaccuggaguacuccacauuccuacuucucccugacauucugcguucagguccagggcaagagcaagagagaaaagaaagauagagucuucacggacaagaccucagccacggucaucugccgcaaaaaugccagcauuagcgugcgggcccaggaccgcuacuauagcucaucuuggagcgaaugggcaucugugcccugcaguggcaguacuucgggcagugguaagccugguaguggugaggguaguacuaaggguagaaaccuccccguggccacuccagacccaggaauguucccaugccuucaccacucccaaaaccugcugagggccgucagcaacaugcuccagaaggccagacaaacucuagaauuuuacccuugcacuucugaagagauugaucaugaagauaucacaaaagauaaaaccagcacaguggaggccuguuuaccauuggaauuaaccaagaaugagaguugccuaaauuccagagagaccucuuucauaacuaaugggaguugccuggccuccagaaagaccucuuuuaugauggcccugugccuuaguaguauuuaugaagacuugaagauguaccagguggaguucaagaccaugaaugcaaaacuucugauggauccuaagaggcagaucuuucuagaucaaaacaugcuggcaguuauugaugagcugaugcaggcccugaauuucaacagugagacugugccacaaaaauccucccuugaagaaccggauuuuuauaaaacuaaaaucaagcucugcauacuucuucaugcuuucagaauuagggcagugacuauugauagagugaugagcuaucugaaugcuuccuaa

SEQ ID NO: 448 - RNA, 786 nt, Artificial Sequence
  CD40LG CDS mRNA wild type
augaucgaaacauacaaccaaacuucuccccgaucugcggccacuggacugcccaucagcaugaaaauuuuuauguauuuacuuacuguuuuucuuaucacccagaugauugggucagcacuuuuugcuguguaucuucauagaagguuggacaagauagaagaugaaaggaaucuucaugaagauuuuguauucaugaaaacgauacagagaugcaacacaggagaaagauccuuauccuuacugaacugugaggagauuaaaagccaguuugaaggcuuugugaaggauauaauguuaaacaaagaggagacgaagaaagaaaacagcuuugaaaugcaaaaaggugaucagaauccucaaauugcggcacaugucauaagugaggccagcaguaaaacaacaucuguguuacagugggcugaaaaaggauacuacaccaugagcaacaacuugguaacccuggaaaaugggaaacagcugaccguuaaaagacaaggacucuauuauaucuaugcccaagucaccuucuguuccaaucgggaagcaucgagucaagcuccauuuauagccagccucugccuaaagucccccgguagauucgagagaaucuuacucagagcugcaaauacccacaguuccgccaaaccuugcgggcaacaauccauucacuugggaggaguauuugaauugcaaccaggugcuucgguguuugucaaugugacugauccaagccaagugagccauggcacuggcuucacguccuuuggcuuacucaaacucuga

SEQ ID NO: 449 - RNA, 1084 nt, Artificial Sequence
  PDCD1 mRNA product wild type
gggagaaagcuuaccaugcagaucccacaggcgcccuggccagucgucugggcggugcuacaacugggcuggcggccaggaugguucuuagacuccccagacaggcccuggaacccccccaccuucuccccagcccugcucguggugaccgaaggggacaacgccaccuucaccuguagcuucuccaacacaucggagagcuucgugcuaaacugguaccgcaugagccccagcaaccagacggacaagcuggccgcuuuccccgaggaccgcagccagcccggccaggacugccgcuuccgugucacacaacugcccaacgggcgugacuuccacaugagcguggucagggcccggcgcaaugacagcggcaccuaccucuguggggccaucucccuggcccccaaggcgcagaucaaagagagccugcgggcagagcucagggugacagagagaagggcagaagugcccacagcccaccccagccccucacccaggccagccggccaguuccaaacccuggugguuggugucgugggcggccugcugggcagccuggugcugcuagucuggguccuggccgucaucugcucccgggccgcacgagggacaauaggagccaggcgcaccggccagccccugaaggaggaccccucagccgugccuguguucucuguggacuauggggagcuggauuuccaguggcgagagaagaccccggagccccccgugcccugugucccugagcagacggaguaugccaccauugucuuuccuagcggaaugggcaccucaucccccgcccgcaggggcucagccgacggcccucggagugcccagccacugaggccugaggauggacacugcucuuggccccucugaggacuaguuauaagacugacuagcccgaugggccucccaacgggcccuccuccccuccuugcaccgagauuaauaaaaaaaaaaaaaaaaaaaaaaaaaaaaaaaaaaaaaaaaaaaaaaaaaaaaaaaaaaaaaaaaugcaucccccccccccccccccccccccccccccccaaaggcucuuuucagagccaccagaauu

SEQ ID NO: 450 - RNA, 667 nt, Artificial Sequence
  PDCD1(1-149) mRNA product wild type
gggagaaagcuuaccaugcagaucccacaggcgcccuggccagucgucugggcggugcuacaacugggcuggcggccaggaugguucuuagacuccccagacaggcccuggaacccccccaccuucuccccagcccugcucguggugaccgaaggggacaacgccaccuucaccuguagcuucuccaacacaucggagagcuucgugcuaaacugguaccgcaugagccccagcaaccagacggacaagcuggccgcuuuccccgaggaccgcagccagcccggccaggacugccgcuuccgugucacacaacugcccaacgggcgugacuuccacaugagcguggucagggcccggcgcaaugacagcggcaccuaccucuguggggccaucucccuggcccccaaggcgcagaucaaagagagccugcgggcagagcucagggugacagagagaagggcaugaggacuaguuauaagacugacuagcccgaugggccucccaacgggcccuccuccccuccuugcaccgagauuaauaaaaaaaaaaaaaaaaaaaaaaaaaaaaaaaaaaaaaaaaaaaaaaaaaaaaaaaaaaaaaaaaugcaucccccccccccccccccccccccccccccccaaaggcucuuuucagagccaccagaauu

SEQ ID NO: 451 - RNA, 877 nt, Artificial Sequence
  IL12A mRNA product wild type
gggagaaagcuuaccauguguccagcgcgcagccuccuccuuguggcuacccugguccuccuggaccaccucaguuuggccagaaaccuccccguggccacuccagacccaggaauguucccaugccuucaccacucccaaaaccugcugagggccgucagcaacaugcuccagaaggccagacaaacucuagaauuuuacccuugcacuucugaagagauugaucaugaagauaucacaaaagauaaaaccagcacaguggaggccuguuuaccauuggaauuaaccaagaaugagaguugccuaaauuccagagagaccucuuucauaacuaaugggaguugccuggccuccagaaagaccucuuuuaugauggcccugugccuuaguaguauuuaugaagacuugaagauguaccagguggaguucaagaccaugaaugcaaaacuucugauggauccuaagaggcagaucuuucuagaucaaaacaugcuggcaguuauugaugagcugaugcaggcccugaauuucaacagugagacugugccacaaaaauccucccuugaagaaccggauuuuuauaaaacuaaaaucaagcucugcauacuucuucaugcuuucagaauuagggcagugacuauugauagagugaugagcuaucugaaugcuuccuaaggacuaguuauaagacugacuagcccgaugggccucccaacgggcccuccuccccuccuugcaccgagauuaauaaaaaaaaaaaaaaaaaaaaaaaaaaaaaaaaaaaaaaaaaaaaaaaaaaaaaaaaaaaaaaaaugcaucccccccccccccccccccccccccccccccaaaggcucuuuucagagccaccagaauu

SEQ ID NO: 452 - RNA, 874 nt, Artificial Sequence
  IL12A(1-219) mRNA product wild type
gggagaaagcuuaccauguguccagcgcgcagccuccuccuuguggcuacccugguccuccuggaccaccucaguuuggccagaaaccuccccguggccacuccagacccaggaauguucccaugccuucaccacucccaaaaccugcugagggccgucagcaacaugcuccagaaggccagacaaacucuagaauuuuacccuugcacuucugaagagauugaucaugaagauaucacaaaagauaaaaccagcacaguggaggccuguuuaccauuggaauuaaccaagaaugagaguugccuaaauuccagagagaccucuuucauaacuaaugggaguugccuggccuccagaaagaccucuuuuaugauggcccugugccuuaguaguauuuaugaagacuugaagauguaccagguggaguucaagaccaugaaugcaaaacuucugauggauccuaagaggcagaucuuucuagaucaaaacaugcuggcaguuauugaugagcugaugcaggcccugaauuucaacagugagacugugccacaaaaauccucccuugaagaaccggauuuuuauaaaacuaaaaucaagcucugcauacuucuucaugcuuucagaauuagggcagugacuauugauagagugaugagcuaucugaaugcuuccggacuaguuauaagacugacuagcccgaugggccucccaacgggcccuccuccccuccuugcaccgagauuaauaaaaaaaaaaaaaaaaaaaaaaaaaaaaaaaaaaaaaaaaaaaaaaaaaaaaaaaaaaaaaaaaugcaucccccccccccccccccccccccccccccccaaaggcucuuuucagagccaccagaauu

SEQ ID NO: 453 - RNA, 811 nt, Artificial Sequence
  IL12A(23-219) mRNA product wild type
gggagaaagcuuaccagaaaccuccccguggccacuccagacccaggaauguucccaugccuucaccacucccaaaaccugcugagggccgucagcaacaugcuccagaaggccagacaaacucuagaauuuuacccuugcacuucugaagagauugaucaugaagauaucacaaaagauaaaaccagcacaguggaggccuguuuaccauuggaauuaaccaagaaugagaguugccuaaauuccagagagaccucuuucauaacuaaugggaguugccuggccuccagaaagaccucuuuuaugauggcccugugccuuaguaguauuuaugaagacuugaagauguaccagguggaguucaagaccaugaaugcaaaacuucugauggauccuaagaggcagaucuuucuagaucaaaacaugcuggcaguuauugaugagcugaugcaggcccugaauuucaacagugagacugugccacaaaaauccucccuugaagaaccggauuuuuauaaaacuaaaaucaagcucugcauacuucuucaugcuuucagaauuagggcagugacuauugauagagugaugagcuaucugaaugcuuccuaaggacuaguuauaagacugacuagcccgaugggccucccaacgggcccuccuccccuccuugcaccgagauuaauaaaaaaaaaaaaaaaaaaaaaaaaaaaaaaaaaaaaaaaaaaaaaaaaaaaaaaaaaaaaaaaaugcaucccccccccccccccccccccccccccccccaaaggcucuuuucagagccaccagaauu

SEQ ID NO: 454 - RNA, 1204 nt, Artificial Sequence
  IL12B mRNA product wild type
gggagaaagcuuaccaugugucaccagcaguuggucaucucuugguuuucccugguuuuucuggcaucuccccucguggccauaugggaacugaagaaagauguuuaugucguagaauuggauugguauccggaugccccuggagaaauggugguccucaccugugacaccccugaagaagaugguaucaccuggaccuuggaccagagcagugaggucuuaggcucuggcaaaacccugaccauccaagucaaagaguuuggagaugcuggccaguacaccugucacaaaggaggcgagguucuaagccauucgcuccugcugcuucacaaaaaggaagauggaauuugguccacugauauuuuaaaggaccagaaagaacccaaaaauaagaccuuucuaagaugcgaggccaagaauuauucuggacguuucaccuguugguggcugacgacaaucaguacugauuugacauucagugucaaaagcagcagaggcucaucugacccccaaggggugacgugcggagcugcuacacucucugcagagagagucagaggggacaacaaggaguaugaguacucaguggagugccaggaggacagugccugcccagcugcugaggagagucugcccauugaggucaugguggaugccguucacaagcucaaguaugaaaacuacaccagcagcuucuucaucagggacaucaucaaaccugacccacccaagaacuugcagcugaagccauuaaaaaauucucggcagguugaggucagcugggaguacccugacaccuggaguacuccacauuccuacuucucccugacauucugcguucagguccagggcaagagcaagagagaaaagaaagauagagucuucacggacaagaccucagccacggucaucugccgcaaaaaugccagcauuagcgugcgggcccaggaccgcuacuauagcucaucuuggagcgaaugggcaucugugcccugcaguuagggacuaguuauaagacugacuagcccgaugggccucccaacgggcccuccuccccuccuugcaccgagauuaauaaaaaaaaaaaaaaaaaaaaaaaaaaaaaaaaaaaaaaaaaaaaaaaaaaaaaaaaaaaaaaaaugcaucccccccccccccccccccccccccccccccaaaggcucuuuucagagccaccagaauu

SEQ ID NO: 455 - RNA, 1201 nt, Artificial Sequence
  IL12B(1-328) mRNA product wild type
gggagaaagcuuaccaugugucaccagcaguuggucaucucuugguuuucccugguuuuucuggcaucuccccucguggccauaugggaacugaagaaagauguuuaugucguagaauuggauugguauccggaugccccuggagaaauggugguccucaccugugacaccccugaagaagaugguaucaccuggaccuuggaccagagcagugaggucuuaggcucuggcaaaacccugaccauccaagucaaagaguuuggagaugcuggccaguacaccugucacaaaggaggcgagguucuaagccauucgcuccugcugcuucacaaaaaggaagauggaauuugguccacugauauuuuaaaggaccagaaagaacccaaaaauaagaccuuucuaagaugcgaggccaagaauuauucuggacguuucaccuguugguggcugacgacaaucaguacugauuugacauucagugucaaaagcagcagaggcucaucugacccccaaggggugacgugcggagcugcuacacucucugcagagagagucagaggggacaacaaggaguaugaguacucaguggagugccaggaggacagugccugcccagcugcugaggagagucugcccauugaggucaugguggaugccguucacaagcucaaguaugaaaacuacaccagcagcuucuucaucagggacaucaucaaaccugacccacccaagaacuugcagcugaagccauuaaaaaauucucggcagguugaggucagcugggaguacccugacaccuggaguacuccacauuccuacuucucccugacauucugcguucagguccagggcaagagcaagagagaaaagaaagauagagucuucacggacaagaccucagccacggucaucugccgcaaaaaugccagcauuagcgugcgggcccaggaccgcuacuauagcucaucuuggagcgaaugggcaucugugcccugcaguggacuaguuauaagacugacuagcccgaugggccucccaacgggcccuccuccccuccuugcaccgagauuaauaaaaaaaaaaaaaaaaaaaaaaaaaaaaaaaaaaaaaaaaaaaaaaaaaaaaaaaaaaaaaaaaugcaucccccccccccccccccccccccccccccccaaaggcucuuuucagagccaccagaauu

SEQ ID NO: 456 - RNA, 1138 nt, Artificial Sequence
  IL12B(23-328) mRNA product wild type
gggagaaagcuuaccauaugggaacugaagaaagauguuuaugucguagaauuggauugguauccggaugccccuggagaaauggugguccucaccugugacaccccugaagaagaugguaucaccuggaccuuggaccagagcagugaggucuuaggcucuggcaaaacccugaccauccaagucaaagaguuuggagaugcuggccaguacaccugucacaaaggaggcgagguucuaagccauucgcuccugcugcuucacaaaaaggaagauggaauuugguccacugauauuuuaaaggaccagaaagaacccaaaaauaagaccuuucuaagaugcgaggccaagaauuauucuggacguuucaccuguugguggcugacgacaaucaguacugauuugacauucagugucaaaagcagcagaggcucaucugacccccaaggggugacgugcggagcugcuacacucucugcagagagagucagaggggacaacaaggaguaugaguacucaguggagugccaggaggacagugccugcccagcugcugaggagagucugcccauugaggucaugguggaugccguucacaagcucaaguaugaaaacuacaccagcagcuucuucaucagggacaucaucaaaccugacccacccaagaacuugcagcugaagccauuaaaaaauucucggcagguugaggucagcugggaguacccugacaccuggaguacuccacauuccuacuucucccugacauucugcguucagguccagggcaagagcaagagagaaaagaaagauagagucuucacggacaagaccucagccacggucaucugccgcaaaaaugccagcauuagcgugcgggcccaggaccgcuacuauagcucaucuuggagcgaaugggcaucugugcccugcaguuagggacuaguuauaagacugacuagcccgaugggccucccaacgggcccuccuccccuccuugcaccgagauuaauaaaaaaaaaaaaaaaaaaaaaaaaaaaaaaaaaaaaaaaaaaaaaaaaaaaaaaaaaaaaaaaaugcaucccccccccccccccccccccccccccccccaaaggcucuuuucagagccaccagaauu

SEQ ID NO: 457 - RNA, 271 nt, Artificial Sequence; identical to SEQ ID NO: 152
  Linker-sFvCC49-218 mRNA product wild type

SEQ ID NO: 458 - RNA, 1849 nt, Artificial Sequence
  IL12 mRNA product wild type
gggagaaagcuuaccaugugucaccagcaguuggucaucucuugguuuucccugguuuuucuggcaucuccccucguggccauaugggaacugaagaaagauguuuaugucguagaauuggauugguauccggaugccccuggagaaauggugguccucaccugugacaccccugaagaagaugguaucaccuggaccuuggaccagagcagugaggucuuaggcucuggcaaaacccugaccauccaagucaaagaguuuggagaugcuggccaguacaccugucacaaaggaggcgagguucuaagccauucgcuccugcugcuucacaaaaaggaagauggaauuugguccacugauauuuuaaaggaccagaaagaacccaaaaauaagaccuuucuaagaugcgaggccaagaauuauucuggacguuucaccuguugguggcugacgacaaucaguacugauuugacauucagugucaaaagcagcagaggcucaucugacccccaaggggugacgugcggagcugcuacacucucugcagagagagucagaggggacaacaaggaguaugaguacucaguggagugccaggaggacagugccugcccagcugcugaggagagucugcccauugaggucaugguggaugccguucacaagcucaaguaugaaaacuacaccagcagcuucuucaucagggacaucaucaaaccugacccacccaagaacuugcagcugaagccauuaaaaaauucucggcagguugaggucagcugggaguacccugacaccuggaguacuccacauuccuacuucucccugacauucugcguucagguccagggcaagagcaagagagaaaagaaagauagagucuucacggacaagaccucagccacggucaucugccgcaaaaaugccagcauuagcgugcgggcccaggaccgcuacuauagcucaucuuggagcgaaugggcaucugugcccugcaguggcaguacuucgggcagugguaagccugguaguggugaggguaguacuaaggguagaaaccuccccguggccacuccagacccaggaauguucccaugccuucaccacucccaaaaccugcugagggccgucagcaacaugcuccagaaggccagacaaacucuagaauuuuacccuugcacuucugaagagauugaucaugaagauaucacaaaagauaaaaccagcacaguggaggccuguuuaccauuggaauuaaccaagaaugagaguugccuaaauuccagagagaccucuuucauaacuaaugggaguugccuggccuccagaaagaccucuuuuaugauggcccugugccuuaguaguauuuaugaagacuugaagauguaccagguggaguucaagaccaugaaugcaaaacuucugauggauccuaagaggcagaucuuucuagaucaaaacaugcuggcaguuauugaugagcugaugcaggcccugaauuucaacagugagacugugccacaaaaauccucccuugaagaaccggauuuuuauaaaacuaaaaucaagcucugcauacuucuucaugcuuucagaauuagggcagugacuauugauagagugaugagcuaucugaaugcuuccuaaggacuaguuauaagacugacuagcccgaugggccucccaacgggcccuccuccccuccuugcaccgagauuaauaaaaaaaaaaaaaaaaaaaaaaaaaaaaaaaaaaaaaaaaaaaaaaaaaaaaaaaaaaaaaaaaugcaucccccccccccccccccccccccccccccccaaaggcucuuuucagagccaccagaauu

SEQ ID NO: 459 - RNA, 1003 nt, Artificial Sequence
  CD40LG mRNA product wild type
gggagaaagcuuaccaugaucgaaacauacaaccaaacuucuccccgaucugcggccacuggacugcccaucagcaugaaaauuuuuauguauuuacuuacuguuuuucuuaucacccagaugauugggucagcacuuuuugcuguguaucuucauagaagguuggacaagauagaagaugaaaggaaucuucaugaagauuuuguauucaugaaaacgauacagagaugcaacacaggagaaagauccuuauccuuacugaacugugaggagauuaaaagccaguuugaaggcuuugugaaggauauaauguuaaacaaagaggagacgaagaaagaaaacagcuuugaaaugcaaaaaggugaucagaauccucaaauugcggcacaugucauaagugaggccagcaguaaaacaacaucuguguuacagugggcugaaaaaggauacuacaccaugagcaacaacuugguaacccuggaaaaugggaaacagcugaccguuaaaagacaaggacucuauuauaucuaugcccaagucaccuucuguuccaaucgggaagcaucgagucaagcuccauuuauagccagccucugccuaaagucccccgguagauucgagagaaucuuacucagagcugcaaauacccacaguuccgccaaaccuugcgggcaacaauccauucacuugggaggaguauuugaauugcaaccaggugcuucgguguuugucaaugugacugauccaagccaagugagccauggcacuggcuucacguccuuuggcuuacucaaacucugaggacuaguuauaagacugacuagcccgaugggccucccaacgggcccuccuccccuccuugcaccgagauuaauaaaaaaaaaaaaaaaaaaaaaaaaaaaaaaaaaaaaaaaaaaaaaaaaaaaaaaaaaaaaaaaaugcaucccccccccccccccccccccccccccccccaaaggcucuuuucagagccaccagaauu

SEQ ID NO: 460 - RNA, 1249 nt, Artificial Sequence
  PDCD1 mRNA product TOP UTR wild type
ggggcgcugccuacggagguggcagccaucuccuucucggcaucaagcuuaccaugcagaucccacaggcgcccuggccagucgucugggcggugcuacaacugggcuggcggccaggaugguucuuagacuccccagacaggcccuggaacccccccaccuucuccccagcccugcucguggugaccgaaggggacaacgccaccuucaccuguagcuucuccaacacaucggagagcuucgugcuaaacugguaccgcaugagccccagcaaccagacggacaagcuggccgcuuuccccgaggaccgcagccagcccggccaggacugccgcuuccgugucacacaacugcccaacgggcgugacuuccacaugagcguggucagggcccggcgcaaugacagcggcaccuaccucuguggggccaucucccuggcccccaaggcgcagaucaaagagagccugcgggcagagcucagggugacagagagaagggcagaagugcccacagcccaccccagccccucacccaggccagccggccaguuccaaacccuggugguuggugucgugggcggccugcugggcagccuggugcugcuagucuggguccuggccgucaucugcucccgggccgcacgagggacaauaggagccaggcgcaccggccagccccugaaggaggaccccucagccgugccuguguucucuguggacuauggggagcuggauuuccaguggcgagagaagaccccggagccccccgugcccugugucccugagcagacggaguaugccaccauugucuuuccuagcggaaugggcaccucaucccccgcccgcaggggcucagccgacggcccucggagugcccagccacugaggccugaggauggacacugcucuuggccccucugaggacuagugcaucacauuuaaaagcaucucagccuaccaugagaauaagagaaagaaaaugaagaucaauagcuuauucaucucuuuuucuuuuucguugguguaaagccaacacccugucuaaaaaacauaaauuucuuuaaucauuuugccucuuuucucugugcuucaauuaauaaaaaauggaaagaaccuagaucuaaaaaaaaaaaaaaaaaaaaaaaaaaaaaaaaaaaaaaaaaaaaaaaaaaaaaaaaaaaaaaaaugcaucccccccccccccccccccccccccccccccaaaggcucuuuucagagccaccagaauu

SEQ ID NO: 461 - RNA, 832 nt, Artificial Sequence
  PDCD1(1-149) mRNA product TOP UTR wild type
ggggcgcugccuacggagguggcagccaucuccuucucggcaucaagcuuaccaugcagaucccacaggcgcccuggccagucgucugggcggugcuacaacugggcuggcggccaggaugguucuuagacuccccagacaggcccuggaacccccccaccuucuccccagcccugcucguggugaccgaaggggacaacgccaccuucaccuguagcuucuccaacacaucggagagcuucgugcuaaacugguaccgcaugagccccagcaaccagacggacaagcuggccgcuuuccccgaggaccgcagccagcccggccaggacugccgcuuccgugucacacaacugcccaacgggcgugacuuccacaugagcguggucagggcccggcgcaaugacagcggcaccuaccucuguggggccaucucccuggcccccaaggcgcagaucaaagagagccugcgggcagagcucagggugacagagagaagggcaugaggacuagugcaucacauuuaaaagcaucucagccuaccaugagaauaagagaaagaaaaugaagaucaauagcuuauucaucucuuuuucuuuuucguugguguaaagccaacacccugucuaaaaaacauaaauuucuuuaaucauuuugccucuuuucucugugcuucaauuaauaaaaaauggaaagaaccuagaucuaaaaaaaaaaaaaaaaaaaaaaaaaaaaaaaaaaaaaaaaaaaaaaaaaaaaaaaaaaaaaaaaugcaucccccccccccccccccccccccccccccccaaaggcucuuuucagagccaccagaauu

SEQ ID NO: 462 - RNA, 1042 nt, Artificial Sequence
  IL12A mRNA product TOP UTR wild type
ggggcgcugccuacggagguggcagccaucuccuucucggcaucaagcuuaccauguguccagcgcgcagccuccuccuuguggcuacccugguccuccuggaccaccucaguuuggccagaaaccuccccguggccacuccagacccaggaauguucccaugccuucaccacucccaaaaccugcugagggccgucagcaacaugcuccagaaggccagacaaacucuagaauuuuacccuugcacuucugaagagauugaucaugaagauaucacaaaagauaaaaccagcacaguggaggccuguuuaccauuggaauuaaccaagaaugagaguugccuaaauuccagagagaccucuuucauaacuaaugggaguugccuggccuccagaaagaccucuuuuaugauggcccugugccuuaguaguauuuaugaagacuugaagauguaccagguggaguucaagaccaugaaugcaaaacuucugauggauccuaagaggcagaucuuucuagaucaaaacaugcuggcaguuauugaugagcugaugcaggcccugaauuucaacagugagacugugccacaaaaauccucccuugaagaaccggauuuuuauaaaacuaaaaucaagcucugcauacuucuucaugcuuucagaauuagggcagugacuauugauagagugaugagcuaucugaaugcuuccuaaggacuagugcaucacauuuaaaagcaucucagccuaccaugagaauaagagaaagaaaaugaagaucaauagcuuauucaucucuuuuucuuuuucguugguguaaagccaacacccugucuaaaaaacauaaauuucuuuaaucauuuugccucuuuucucugugcuucaauuaauaaaaaauggaaagaaccuagaucuaaaaaaaaaaaaaaaaaaaaaaaaaaaaaaaaaaaaaaaaaaaaaaaaaaaaaaaaaaaaaaaaugcaucccccccccccccccccccccccccccccccaaaggcucuuuucagagccaccagaauu

SEQ ID NO: 463 - RNA, 1039 nt, Artificial Sequence
  IL12A(1-219) mRNA product TOP UTR wild type
ggggcgcugccuacggagguggcagccaucuccuucucggcaucaagcuuaccauguguccagcgcgcagccuccuccuuguggcuacccugguccuccuggaccaccucaguuuggccagaaaccuccccguggccacuccagacccaggaauguucccaugccuucaccacucccaaaaccugcugagggccgucagcaacaugcuccagaaggccagacaaacucuagaauuuuacccuugcacuucugaagagauugaucaugaagauaucacaaaagauaaaaccagcacaguggaggccuguuuaccauuggaauuaaccaagaaugagaguugccuaaauuccagagagaccucuuucauaacuaaugggaguugccuggccuccagaaagaccucuuuuaugauggcccugugccuuaguaguauuuaugaagacuugaagauguaccagguggaguucaagaccaugaaugcaaaacuucugauggauccuaagaggcagaucuuucuagaucaaaacaugcuggcaguuauugaugagcugaugcaggcccugaauuucaacagugagacugugccacaaaaauccucccuugaagaaccggauuuuuauaaaacuaaaaucaagcucugcauacuucuucaugcuuucagaauuagggcagugacuauugauagagugaugagcuaucugaaugcuuccggacuagugcaucacauuuaaaagcaucucagccuaccaugagaauaagagaaagaaaaugaagaucaauagcuuauucaucucuuuuucuuuuucguugguguaaagccaacacccugucuaaaaaacauaaauuucuuuaaucauuuugccucuuuucucugugcuucaauuaauaaaaaauggaaagaaccuagaucuaaaaaaaaaaaaaaaaaaaaaaaaaaaaaaaaaaaaaaaaaaaaaaaaaaaaaaaaaaaaaaaaugcaucccccccccccccccccccccccccccccccaaaggcucuuuucagagccaccagaauu

SEQ ID NO: 464 - RNA, 976 nt, Artificial Sequence
  IL12A(23-219) mRNA product TOP UTR wild type
ggggcgcugccuacggagguggcagccaucuccuucucggcaucaagcuuaccagaaaccuccccguggccacuccagacccaggaauguucccaugccuucaccacucccaaaaccugcugagggccgucagcaacaugcuccagaaggccagacaaacucuagaauuuuacccuugcacuucugaagagauugaucaugaagauaucacaaaagauaaaaccagcacaguggaggccuguuuaccauuggaauuaaccaagaaugagaguugccuaaauuccagagagaccucuuucauaacuaaugggaguugccuggccuccagaaagaccucuuuuaugauggcccugugccuuaguaguauuuaugaagacuugaagauguaccagguggaguucaagaccaugaaugcaaaacuucugauggauccuaagaggcagaucuuucuagaucaaaacaugcuggcaguuauugaugagcugaugcaggcccugaauuucaacagugagacugugccacaaaaauccucccuugaagaaccggauuuuuauaaaacuaaaaucaagcucugcauacuucuucaugcuuucagaauuagggcagugacuauugauagagugaugagcuaucugaaugcuuccuaaggacuagugcaucacauuuaaaagcaucucagccuaccaugagaauaagagaaagaaaaugaagaucaauagcuuauucaucucuuuuucuuuuucguugguguaaagccaacacccugucuaaaaaacauaaauuucuuuaaucauuuugccucuuuucucugugcuucaauuaauaaaaaauggaaagaaccuagaucuaaaaaaaaaaaaaaaaaaaaaaaaaaaaaaaaaaaaaaaaaaaaaaaaaaaaaaaaaaaaaaaaugcaucccccccccccccccccccccccccccccccaaaggcucuuuucagagccaccagaauu

SEQ ID NO: 465 - RNA, 1369 nt, Artificial Sequence
  IL12B mRNA product TOP UTR wild type
ggggcgcugccuacggagguggcagccaucuccuucucggcaucaagcuuaccaugugucaccagcaguuggucaucucuugguuuucccugguuuuucuggcaucuccccucguggccauaugggaacugaagaaagauguuuaugucguagaauuggauugguauccggaugccccuggagaaauggugguccucaccugugacaccccugaagaagaugguaucaccuggaccuuggaccagagcagugaggucuuaggcucuggcaaaacccugaccauccaagucaaagaguuuggagaugcuggccaguacaccugucacaaaggaggcgagguucuaagccauucgcuccugcugcuucacaaaaaggaagauggaauuugguccacugauauuuuaaaggaccagaaagaacccaaaaauaagaccuuucuaagaugcgaggccaagaauuauucuggacguuucaccuguugguggcugacgacaaucaguacugauuugacauucagugucaaaagcagcagaggcucaucugacccccaaggggugacgugcggagcugcuacacucucugcagagagagucagaggggacaacaaggaguaugaguacucaguggagugccaggaggacagugccugcccagcugcugaggagagucugcccauugaggucaugguggaugccguucacaagcucaaguaugaaaacuacaccagcagcuucuucaucagggacaucaucaaaccugacccacccaagaacuugcagcugaagccauuaaaaaauucucggcagguugaggucagcugggaguacccugacaccuggaguacuccacauuccuacuucucccugacauucugcguucagguccagggcaagagcaagagagaaaagaaagauagagucuucacggacaagaccucagccacggucaucugccgcaaaaaugccagcauuagcgugcgggcccaggaccgcuacuauagcucaucuuggagcgaaugggcaucugugcccugcaguuagggacuagugcaucacauuuaaaagcaucucagccuaccaugagaauaagagaaagaaaaugaagaucaauagcuuauucaucucuuuuucuuuuucguugguguaaagccaacacccugucuaaaaaacauaaauuucuuuaaucauuuugccucuuuucucugugcuucaauuaauaaaaaauggaaagaaccuagaucuaaaaaaaaaaaaaaaaaaaaaaaaaaaaaaaaaaaaaaaaaaaaaaaaaaaaaaaaaaaaaaaaugcaucccccccccccccccccccccccccccccccaaaggcucuuuucagagccaccagaauu

SEQ ID NO: 466 - RNA, 1366 nt, Artificial Sequence
  IL12B(1-328) mRNA product TOP UTR wild type
ggggcgcugccuacggagguggcagccaucuccuucucggcaucaagcuuaccaugugucaccagcaguuggucaucucuugguuuucccugguuuuucuggcaucuccccucguggccauaugggaacugaagaaagauguuuaugucguagaauuggauugguauccggaugccccuggagaaauggugguccucaccugugacaccccugaagaagaugguaucaccuggaccuuggaccagagcagugaggucuuaggcucuggcaaaacccugaccauccaagucaaagaguuuggagaugcuggccaguacaccugucacaaaggaggcgagguucuaagccauucgcuccugcugcuucacaaaaaggaagauggaauuugguccacugauauuuuaaaggaccagaaagaacccaaaaauaagaccuuucuaagaugcgaggccaagaauuauucuggacguuucaccuguugguggcugacgacaaucaguacugauuugacauucagugucaaaagcagcagaggcucaucugacccccaaggggugacgugcggagcugcuacacucucugcagagagagucagaggggacaacaaggaguaugaguacucaguggagugccaggaggacagugccugcccagcugcugaggagagucugcccauugaggucaugguggaugccguucacaagcucaaguaugaaaacuacaccagcagcuucuucaucagggacaucaucaaaccugacccacccaagaacuugcagcugaagccauuaaaaaauucucggcagguugaggucagcugggaguacccugacaccuggaguacuccacauuccuacuucucccugacauucugcguucagguccagggcaagagcaagagagaaaagaaagauagagucuucacggacaagaccucagccacggucaucugccgcaaaaaugccagcauuagcgugcgggcccaggaccgcuacuauagcucaucuuggagcgaaugggcaucugugcccugcaguggacuagugcaucacauuuaaaagcaucucagccuaccaugagaauaagagaaagaaaaugaagaucaauagcuuauucaucucuuuuucuuuuucguugguguaaagccaacacccugucuaaaaaacauaaauuucuuuaaucauuuugccucuuuucucugugcuucaauuaauaaaaaauggaaagaaccuagaucuaaaaaaaaaaaaaaaaaaaaaaaaaaaaaaaaaaaaaaaaaaaaaaaaaaaaaaaaaaaaaaaaugcaucccccccccccccccccccccccccccccccaaaggcucuuuucagagccaccagaauu

SEQ ID NO: 467 - RNA, 1303 nt, Artificial Sequence
  IL12B(23-328) mRNA product TOP UTR wild type
ggggcgcugccuacggagguggcagccaucuccuucucggcaucaagcuuaccauaugggaacugaagaaagauguuuaugucguagaauuggauugguauccggaugccccuggagaaauggugguccucaccugugacaccccugaagaagaugguaucaccuggaccuuggaccagagcagugaggucuuaggcucuggcaaaacccugaccauccaagucaaagaguuuggagaugcuggccaguacaccugucacaaaggaggcgagguucuaagccauucgcuccugcugcuucacaaaaaggaagauggaauuugguccacugauauuuuaaaggaccagaaagaacccaaaaauaagaccuuucuaagaugcgaggccaagaauuauucuggacguuucaccuguugguggcugacgacaaucaguacugauuugacauucagugucaaaagcagcagaggcucaucugacccccaaggggugacgugcggagcugcuacacucucugcagagagagucagaggggacaacaaggaguaugaguacucaguggagugccaggaggacagugccugcccagcugcugaggagagucugcccauugaggucaugguggaugccguucacaagcucaaguaugaaaacuacaccagcagcuucuucaucagggacaucaucaaaccugacccacccaagaacuugcagcugaagccauuaaaaaauucucggcagguugaggucagcugggaguacccugacaccuggaguacuccacauuccuacuucucccugacauucugcguucagguccagggcaagagcaagagagaaaagaaagauagagucuucacggacaagaccucagccacggucaucugccgcaaaaaugccagcauuagcgugcgggcccaggaccgcuacuauagcucaucuuggagcgaaugggcaucugugcccugcaguuagggacuagugcaucacauuuaaaagcaucucagccuaccaugagaauaagagaaagaaaaugaagaucaauagcuuauucaucucuuuuucuuuuucguugguguaaagccaacacccugucuaaaaaacauaaauuucuuuaaucauuuugccucuuuucucugugcuucaauuaauaaaaaauggaaagaaccuagaucuaaaaaaaaaaaaaaaaaaaaaaaaaaaaaaaaaaaaaaaaaaaaaaaaaaaaaaaaaaaaaaaaugcaucccccccccccccccccccccccccccccccaaaggcucuuuucagagccaccagaauu

SEQ ID NO: 468 - RNA, 436 nt, Artificial Sequence; identical to SEQ ID NO: 284
  Linker-sFvCC49-218 mRNA product TOP UTR wild type

SEQ ID NO: 469 - RNA, 2014 nt, Artificial Sequence
  IL12 mRNA product TOP UTR wild type
ggggcgcugccuacggagguggcagccaucuccuucucggcaucaagcuuaccaugugucaccagcaguuggucaucucuugguuuucccugguuuuucuggcaucuccccucguggccauaugggaacugaagaaagauguuuaugucguagaauuggauugguauccggaugccccuggagaaauggugguccucaccugugacaccccugaagaagaugguaucaccuggaccuuggaccagagcagugaggucuuaggcucuggcaaaacccugaccauccaagucaaagaguuuggagaugcuggccaguacaccugucacaaaggaggcgagguucuaagccauucgcuccugcugcuucacaaaaaggaagauggaauuugguccacugauauuuuaaaggaccagaaagaacccaaaaauaagaccuuucuaagaugcgaggccaagaauuauucuggacguuucaccuguugguggcugacgacaaucaguacugauuugacauucagugucaaaagcagcagaggcucaucugacccccaaggggugacgugcggagcugcuacacucucugcagagagagucagaggggacaacaaggaguaugaguacucaguggagugccaggaggacagugccugcccagcugcugaggagagucugcccauugaggucaugguggaugccguucacaagcucaaguaugaaaacuacaccagcagcuucuucaucagggacaucaucaaaccugacccacccaagaacuugcagcugaagccauuaaaaaauucucggcagguugaggucagcugggaguacccugacaccuggaguacuccacauuccuacuucucccugacauucugcguucagguccagggcaagagcaagagagaaaagaaagauagagucuucacggacaagaccucagccacggucaucugccgcaaaaaugccagcauuagcgugcgggcccaggaccgcuacuauagcucaucuuggagcgaaugggcaucugugcccugcaguggcaguacuucgggcagugguaagccugguaguggugaggguaguacuaaggguagaaaccuccccguggccacuccagacccaggaauguucccaugccuucaccacucccaaaaccugcugagggccgucagcaacaugcuccagaaggccagacaaacucuagaauuuuacccuugcacuucugaagagauugaucaugaagauaucacaaaagauaaaaccagcacaguggaggccuguuuaccauuggaauuaaccaagaaugagaguugccuaaauuccagagagaccucuuucauaacuaaugggaguugccuggccuccagaaagaccucuuuuaugauggcccugugccuuaguaguauuuaugaagacuugaagauguaccagguggaguucaagaccaugaaugcaaaacuucugauggauccuaagaggcagaucuuucuagaucaaaacaugcuggcaguuauugaugagcugaugcaggcccugaauuucaacagugagacugugccacaaaaauccucccuugaagaaccggauuuuuauaaaacuaaaaucaagcucugcauacuucuucaugcuuucagaauuagggcagugacuauugauagagugaugagcuaucugaaugcuuccuaaggacuagugcaucacauuuaaaagcaucucagccuaccaugagaauaagagaaagaaaaugaagaucaauagcuuauucaucucuuuuucuuuuucguugguguaaagccaacacccugucuaaaaaacauaaauuucuuuaaucauuuugccucuuuucucugugcuucaauuaauaaaaaauggaaagaaccuagaucuaaaaaaaaaaaaaaaaaaaaaaaaaaaaaaaaaaaaaaaaaaaaaaaaaaaaaaaaaaaaaaaaugcaucccccccccccccccccccccccccccccccaaaggcucuuuucagagccaccagaauu

SEQ ID NO: 470 - RNA, 1168 nt, Artificial Sequence
  CD40LG mRNA product TOP UTR wild type
ggggcgcugccuacggagguggcagccaucuccuucucggcaucaagcuuaccaugaucgaaacauacaaccaaacuucuccccgaucugcggccacuggacugcccaucagcaugaaaauuuuuauguauuuacuuacuguuuuucuuaucacccagaugauugggucagcacuuuuugcuguguaucuucauagaagguuggacaagauagaagaugaaaggaaucuucaugaagauuuuguauucaugaaaacgauacagagaugcaacacaggagaaagauccuuauccuuacugaacugugaggagauuaaaagccaguuugaaggcuuugugaaggauauaauguuaaacaaagaggagacgaagaaagaaaacagcuuugaaaugcaaaaaggugaucagaauccucaaauugcggcacaugucauaagugaggccagcaguaaaacaacaucuguguuacagugggcugaaaaaggauacuacaccaugagcaacaacuugguaacccuggaaaaugggaaacagcugaccguuaaaagacaaggacucuauuauaucuaugcccaagucaccuucuguuccaaucgggaagcaucgagucaagcuccauuuauagccagccucugccuaaagucccccgguagauucgagagaaucuuacucagagcugcaaauacccacaguuccgccaaaccuugcgggcaacaauccauucacuugggaggaguauuugaauugcaaccaggugcuucgguguuugucaaugugacugauccaagccaagugagccauggcacuggcuucacguccuuuggcuuacucaaacucugaggacuagugcaucacauuuaaaagcaucucagccuaccaugagaauaagagaaagaaaaugaagaucaauagcuuauucaucucuuuuucuuuuucguugguguaaagccaacacccugucuaaaaaacauaaauuucuuuaaucauuuugccucuuuucucugugcuucaauuaauaaaaaauggaaagaaccuagaucuaaaaaaaaaaaaaaaaaaaaaaaaaaaaaaaaaaaaaaaaaaaaaaaaaaaaaaaaaaaaaaaaugcaucccccccccccccccccccccccccccccccaaaggcucuuuucagagccaccagaauu

SEQ ID NO: 471 - RNA, 20 nt, Artificial Sequence
  Immune stimulatory RNA
gguuuuuuuuuuuuuuuggg

SEQ ID NO: 472 - RNA, 20 nt, Artificial Sequence
  Immune stimulatory RNA
ggggguuuuuuuuuuggggg

SEQ ID NO: 473 - RNA, 40 nt, Artificial Sequence
  Immune stimulatory RNA
ggggguuuuuuuuuuuuuuuuuuuuuuuuuuuuuuggggg

SEQ ID NO: 474 - RNA, 39 nt, Artificial Sequence
  Immune stimulatory RNA
guguguguguguuuuuuuuuuuuuuuugugugugugugu

SEQ ID NO: 475 - RNA, 39 nt, Artificial Sequence
  Immune stimulatory RNA
gguugguugguuuuuuuuuuuuuuuuugguugguugguu

SEQ ID NO: 476 - RNA, 20 nt, Artificial Sequence
  Immune stimulatory RNA
ggggggggguuugggggggg

SEQ ID NO: 477 - RNA, 20 nt, Artificial Sequence
  Immune stimulatory RNA
gggggggguuuugggggggg

SEQ ID NO: 478 - RNA, 20 nt, Artificial Sequence
  Immune stimulatory RNA
ggggggguuuuuuggggggg

SEQ ID NO: 479 - RNA, 20 nt, Artificial Sequence
  Immune stimulatory RNA
ggggggguuuuuuugggggg

SEQ ID NO: 480 - RNA, 20 nt, Artificial Sequence
  Immune stimulatory RNA
gggggguuuuuuuugggggg

SEQ ID NO: 481 - RNA, 20 nt, Artificial Sequence
  Immune stimulatory RNA
gggggguuuuuuuuuggggg

SEQ ID NO: 482 - RNA, 20 nt, Artificial Sequence
  Immune stimulatory RNA
gggggguuuuuuuuuugggg

SEQ ID NO: 483 - RNA, 20 nt, Artificial Sequence
  Immune stimulatory RNA
ggggguuuuuuuuuuugggg

SEQ ID NO: 484 - RNA, 20 nt, Artificial Sequence
  Immune stimulatory RNA
ggggguuuuuuuuuuuuggg

SEQ ID NO: 485 - RNA, 20 nt, Artificial Sequence
  Immune stimulatory RNA
gggguuuuuuuuuuuuuggg

SEQ ID NO: 486 - RNA, 20 nt, Artificial Sequence
  Immune stimulatory RNA
gggguuuuuuuuuuuuuugg

SEQ ID NO: 487 - RNA, 20 nt, Artificial Sequence
  Immune stimulatory RNA
gguuuuuuuuuuuuuuuugg

SEQ ID NO: 488 - RNA, 20 nt, Artificial Sequence
  Immune stimulatory RNA
guuuuuuuuuuuuuuuuuug

SEQ ID NO: 489 - RNA, 22 nt, Artificial Sequence
  Immune stimulatory RNA
gggggggggguuuggggggggg

SEQ ID NO: 490 - RNA, 22 nt, Artificial Sequence
  Immune stimulatory RNA
ggggggggguuuuggggggggg

SEQ ID NO: 491 - RNA, 22 nt, Artificial Sequence
  Immune stimulatory RNA
gggggggguuuuuugggggggg

SEQ ID NO: 492 - RNA, 22 nt, Artificial Sequence
  Immune stimulatory RNA
gggggggguuuuuuuggggggg

SEQ ID NO: 493 - RNA, 22 nt, Artificial Sequence
  Immune stimulatory RNA
ggggggguuuuuuuuggggggg

SEQ ID NO: 494 - RNA, 22 nt, Artificial Sequence
  Immune stimulatory RNA
ggggggguuuuuuuuugggggg

SEQ ID NO: 495 - RNA, 22 nt, Artificial Sequence
  Immune stimulatory RNA
ggggggguuuuuuuuuuggggg

SEQ ID NO: 496 - RNA, 22 nt, Artificial Sequence
  Immune stimulatory RNA
gggggguuuuuuuuuuuggggg

SEQ ID NO: 497 - RNA, 22 nt, Artificial Sequence
  Immune stimulatory RNA
gggggguuuuuuuuuuuugggg

SEQ ID NO: 498 - RNA, 22 nt, Artificial Sequence
  Immune stimulatory RNA
ggggguuuuuuuuuuuuugggg

SEQ ID NO: 499 - RNA, 22 nt, Artificial Sequence
  Immune stimulatory RNA
ggggguuuuuuuuuuuuuuggg

SEQ ID NO: 500 - RNA, 22 nt, Artificial Sequence
  Immune stimulatory RNA
ggguuuuuuuuuuuuuuuuggg

SEQ ID NO: 501 - RNA, 22 nt, Artificial Sequence
  Immune stimulatory RNA
gguuuuuuuuuuuuuuuuuugg

SEQ ID NO: 502 - RNA, 24 nt, Artificial Sequence
  Immune stimulatory RNA
ggggggggggguuugggggggggg

SEQ ID NO: 503 - RNA, 24 nt, Artificial Sequence
  Immune stimulatory RNA
gggggggggguuuugggggggggg

SEQ ID NO: 504 - RNA, 24 nt, Artificial Sequence
  Immune stimulatory RNA
ggggggggguuuuuuggggggggg

SEQ ID NO: 505 - RNA, 24 nt, Artificial Sequence
  Immune stimulatory RNA
ggggggggguuuuuuugggggggg

SEQ ID NO: 506 - RNA, 24 nt, Artificial Sequence
  Immune stimulatory RNA
gggggggguuuuuuuugggggggg

SEQ ID NO: 507 - RNA, 24 nt, Artificial Sequence
  Immune stimulatory RNA
gggggggguuuuuuuuuggggggg

SEQ ID NO: 508 - RNA, 24 nt, Artificial Sequence
  Immune stimulatory RNA
gggggggguuuuuuuuuugggggg

SEQ ID NO: 509 - RNA, 24 nt, Artificial Sequence
  Immune stimulatory RNA
ggggggguuuuuuuuuuugggggg

SEQ ID NO: 510 - RNA, 24 nt, Artificial Sequence
  Immune stimulatory RNA
ggggggguuuuuuuuuuuuggggg

SEQ ID NO: 511 - RNA, 24 nt, Artificial Sequence
  Immune stimulatory RNA
gggggguuuuuuuuuuuuuggggg

SEQ ID NO: 512 - RNA, 24 nt, Artificial Sequence
  Immune stimulatory RNA
gggggguuuuuuuuuuuuuugggg

SEQ ID NO: 513 - RNA, 24 nt, Artificial Sequence
  Immune stimulatory RNA
gggguuuuuuuuuuuuuuuugggg

SEQ ID NO: 514 - RNA, 24 nt, Artificial Sequence
  Immune stimulatory RNA
ggguuuuuuuuuuuuuuuuuuggg

SEQ ID NO: 515 - RNA, 32 nt, Artificial Sequence
  Immune stimulatory RNA
guuuuuuuuuuuuuuuuuuuuuuuuuuuuuug

SEQ ID NO: 516 - RNA, 34 nt, Artificial Sequence
  Immune stimulatory RNA
gguuuuuuuuuuuuuuuuuuuuuuuuuuuuuugg

SEQ ID NO: 517 - RNA, 36 nt, Artificial Sequence
  Immune stimulatory RNA
ggguuuuuuuuuuuuuuuuuuuuuuuuuuuuuuggg

SEQ ID NO: 518 - RNA, 37 nt, Artificial Sequence
  Immune stimulatory RNA
gggguuuuuuuuuuuuuuuuuuuuuuuuuuuuuuggg

SEQ ID NO: 519 - RNA, 39 nt, Artificial Sequence
  Immune stimulatory RNA
ggggguuuuuuuuuuuuuuuuuuuuuuuuuuuuuugggg

SEQ ID NO: 520 - RNA, 41 nt, Artificial Sequence
  Immune stimulatory RNA
gggggguuuuuuuuuuuuuuuuuuuuuuuuuuuuuuggggg

SEQ ID NO: 521 - RNA, 43 nt, Artificial Sequence
  Immune stimulatory RNA
ggggggguuuuuuuuuuuuuuuuuuuuuuuuuuuuuugggggg

SEQ ID NO: 522 - RNA, 45 nt, Artificial Sequence
  Immune stimulatory RNA
gggggggguuuuuuuuuuuuuuuuuuuuuuuuuuuuuuggggggg

SEQ ID NO: 523 - RNA, 47 nt, Artificial Sequence
  Immune stimulatory RNA
ggggggggguuuuuuuuuuuuuuuuuuuuuuuuuuuuuugggggggg

SEQ ID NO: 524-526 - skipped (3 entries)

SEQ ID NO: 527 - RNA, 10 nt, Artificial Sequence
  Immune stimulatory RNA
gguuuuuugg

SEQ ID NO: 528 - RNA, 11 nt, Artificial Sequence
  Immune stimulatory RNA
gguuuuuuugg

SEQ ID NO: 529 - RNA, 12 nt, Artificial Sequence
  Immune stimulatory RNA
gguuuuuuuugg

SEQ ID NO: 530 - RNA, 13 nt, Artificial Sequence
  Immune stimulatory RNA
gguuuuuuuuugg

SEQ ID NO: 531 - RNA, 14 nt, Artificial Sequence
  Immune stimulatory RNA
gguuuuuuuuuugg

SEQ ID NO: 532 - RNA, 15 nt, Artificial Sequence
  Immune stimulatory RNA
gguuuuuuuuuuugg

SEQ ID NO: 533 - RNA, 16 nt, Artificial Sequence
  Immune stimulatory RNA
gguuuuuuuuuuuugg

SEQ ID NO: 534 - RNA, 17 nt, Artificial Sequence
  Immune stimulatory RNA
gguuuuuuuuuuuuugg

SEQ ID NO: 535 - RNA, 18 nt, Artificial Sequence
  Immune stimulatory RNA
gguuuuuuuuuuuuuugg

SEQ ID NO: 536 - RNA, 19 nt, Artificial Sequence
  Immune stimulatory RNA
gguuuuuuuuuuuuuuugg

SEQ ID NO: 537 - skipped

SEQ ID NO: 538 - RNA, 10 nt, Artificial Sequence
  Immune stimulatory RNA
ggguuuuggg

SEQ ID NO: 539 - RNA, 11 nt, Artificial Sequence
  Immune stimulatory RNA
ggguuuuuggg

SEQ ID NO: 540 - RNA, 12 nt, Artificial Sequence
  Immune stimulatory RNA
ggguuuuuuggg

SEQ ID NO: 541 - RNA, 13 nt, Artificial Sequence
  Immune stimulatory RNA
ggguuuuuuuggg

SEQ ID NO: 542 - RNA, 14 nt, Artificial Sequence
  Immune stimulatory RNA
ggguuuuuuuuggg

SEQ ID NO: 543 - RNA, 15 nt, Artificial Sequence
  Immune stimulatory RNA
ggguuuuuuuuuggg

SEQ ID NO: 544 - RNA, 16 nt, Artificial Sequence
  Immune stimulatory RNA
ggguuuuuuuuuuggg

SEQ ID NO: 545 - RNA, 17 nt, Artificial Sequence
  Immune stimulatory RNA
ggguuuuuuuuuuuggg

SEQ ID NO: 546 - RNA, 18 nt, Artificial Sequence
  Immune stimulatory RNA
ggguuuuuuuuuuuuggg

SEQ ID NO: 547 - RNA, 19 nt, Artificial Sequence
  Immune stimulatory RNA
ggguuuuuuuuuuuuuggg

SEQ ID NO: 548 - RNA, 57 nt, Artificial Sequence
  Immune stimulatory RNA
ggguuuuuuuuuuuuuuuggguuuuuuuuuuuuuuuggguuuuuuuuuuuuuuuggg

SEQ ID NO: 549 - RNA, 42 nt, Artificial Sequence
  Immune stimulatory RNA
ggguuuuuuuuuuuuuuugggggguuuuuuuuuuuuuuuggg

SEQ ID NO: 550 - RNA, 51 nt, Artificial Sequence
  Immune stimulatory RNA
ggguuuggguuuggguuuggguuuggguuuggguuuggguuuggguuuggg

SEQ ID NO: 551 - RNA, 20 nt, Artificial Sequence
  Immune stimulatory RNA
gguuuuuuuuuuuuuuuggg

SEQ ID NO: 552 - RNA, 57 nt, Artificial Sequence
  Immune stimulatory RNA
cccuuuuuuuuuuuuuuucccuuuuuuuuuuuuuuucccuuuuuuuuuuuuuuuccc

SEQ ID NO: 553 - RNA, 51 nt, Artificial Sequence
  Immune stimulatory RNA
cccuuucccuuucccuuucccuuucccuuucccuuucccuuucccuuuccc

SEQ ID NO: 554 - RNA, 42 nt, Artificial Sequence
  Immune stimulatory RNA
cccuuuuuuuuuuuuuuuccccccuuuuuuuuuuuuuuuccc

SEQ ID NO: 555 - RNA, 60 nt, Artificial Sequence
  Immune stimulatory RNA
uagcgaagcucuuggaccuagguuuuuuuuuuuuuuugggugcguuccuagaaguacacg

SEQ ID NO: 556 - RNA, 120 nt, Artificial Sequence
  Immune stimulatory RNA
uagcgaagcucuuggaccuagguuuuuuuuuuuuuuugggugcguuccuagaaguacacgaucgcuucgagaaccuggauccaaaaaaaaaaaaaaacccacgcaaggaucuucaugugc

SEQ ID NO: 557 - RNA, 229 nt, Artificial Sequence
  Immune stimulatory RNA
gggagaaagcucaagcuuggagcaaugcccgcacauugaggaaaccgaguugcauaucucagaguauuggcccccguguagguuauucuugacagacaguggagcuuauucacucccaggauccgagucgcauacuacgguacuggugacagaccuaggucgucaguugaccaguccgccacuagacgugaguccgucaaagcaguuagauguuacacucuauuagauc

SEQ ID NO: 558 - RNA, 547 nt, Artificial Sequence
  Immune stimulatory RNA
gggagaaagcucaagcuuggagcaaugcccgcacauugaggaaaccgaguugcauaucucagaguauuggcccccguguagguuauucuugacagacaguggagcuuauucacucccaggauccgagucgcauacuacgguacuggugacagaccuaggucgucaguugaccaguccgccacuagacgugaguccgucaaagcaguuagauguuacacucuauuagaucucggauuacagcuggaaggagcaggaguaguguucuugcucuaaguaccgagugugcccaauacccgaucagcuuauuaacgaacggcuccuccucuuagacugcagcguaagugcggaaucuggggaucaaauuacugacugccuggauuacccucggacauauaaccuuguagcacgcuguugcuguauaggugaccaacgcccacucgaguagaccagcucucuuaguccggacaaugauaggaggcgcggucaaucuacuucuggcuaguuaagaauaggcugcaccgaccucuauaaguagcguguccucuag

SEQ ID NO: 559 - RNA, 1083 nt, Artificial Sequence
  Immune stimulatory RNA
gggagaaagcucaagcuuggagcaaugcccgcacauugaggaaaccgaguugcauaucucagaguauuggcccccguguagguuauucuugacagacaguggagcuuauucacucccaggauccgagucgcauacuacgguacuggugacagaccuaggucgucaguugaccaguccgccacuagacgugaguccgucaaagcaguuagauguuacacucuauuagaucucggauuacagcuggaaggagcaggaguaguguucuugcucuaaguaccgagugugcccaauacccgaucagcuuauuaacgaacggcuccuccucuuagacugcagcguaagugcggaaucuggggaucaaauuacugacugccuggauuacccucggacauauaaccuuguagcacgcuguugcuguauaggugaccaacgcccacucgaguagaccagcucucuuaguccggacaaugauaggaggcgcggucaaucuacuucuggcuaguuaagaauaggcugcaccgaccucuauaaguagcguguccucuagagcuacgcagguucgcaauaaaagcguugauuagugugcauagaacagaccucuuauucggugaaacgccagaaugcuaaauuccaauaacucuucccaaaacgcguacggccgaagacgcgcgcuuaucuuguguacguucucgcacauggaagaaucagcgggcauggugguagggcaauaggggagcuggguagcagcgaaaaagggccccugcgcacguagcuucgcuguucgucugaaacaacccggcauccguuguagcgaucccguuaucaguguuauucuugugcgcacuaagauucaugguguagucgacaauaacagcgucuuggcagauucuggucacgugcccuaugcccgggcuugugccucucaggugcacagcgauacuuaaagccuucaagguacucgacguggguaccgauucgugacacuuccuaagauuauuccacuguguuagccccgcaccgccgaccuaaacugguccaauguauacgcauucgcugagcggaucgauaauaaaagcuugaauu

SEQ ID NO: 560 - RNA, 229 nt, Artificial Sequence; identical to SEQ ID NO: 437
  Immune stimulatory RNA

SEQ ID NO: 561 - RNA, 546 nt, Artificial Sequence; identical to SEQ ID NO: 435
  Immune stimulatory RNA

SEQ ID NO: 562 - RNA, 547 nt, Artificial Sequence; identical to SEQ ID NO: 433
  Immune stimulatory RNA

SEQ ID NO: 563 - RNA, 1083 nt, Artificial Sequence; identical to SEQ ID NO: 436
  Immune stimulatory RNA

SEQ ID NO: 564 - RNA, 59 nt, Artificial Sequence
  Immune stimulatory RNA
uagcgaagcucuuggaccuaccuuuuuuuuuuuuuucccugcguuccuagaaguacacg

SEQ ID NO: 565 - RNA, 120 nt, Artificial Sequence
  Immune stimulatory RNA
uagcgaagcucuuggaccuaccuuuuuuuuuuuuuuucccugcguuccuagaaguacacgaucgcuucgagaaccuggauggaaaaaaaaaaaaaaagggacgcaaggaucuucaugugc

SEQ ID NO: 566 - protein, 9 aa, Artificial Sequence
  cationic component of the polymeric carrier
CRRRRRRRC

SEQ ID NO: 567 - protein, 10 aa, Artificial Sequence
  cationic component of the polymeric carrier
CRRRRRRRRC

SEQ ID NO: 568 - protein, 11 aa, Artificial Sequence
  cationic component of the polymeric carrier
CRRRRRRRRRC

SEQ ID NO: 569 - protein, 12 aa, Artificial Sequence
  cationic component of the polymeric carrier
CRRRRRRRRRRC

SEQ ID NO: 570 - protein, 13 aa, Artificial Sequence
  cationic component of the polymeric carrier
CRRRRRRRRRRRC

SEQ ID NO: 571 - protein, 15 aa, Artificial Sequence
  cationic component of the polymeric carrier
CRRRRRRRRRRRRRC

SEQ ID NO: 572 - protein, 16 aa, Artificial Sequence
  cationic component of the polymeric carrier
CRRRRRRRRRRRRRRC

SEQ ID NO: 573 - protein, 17 aa, Artificial Sequence
  cationic component of the polymeric carrier
CRRRRRRRRRRRRRRRC

SEQ ID NO: 574 - protein, 18 aa, Artificial Sequence
  cationic component of the polymeric carrier
CRRRRRRRRRRRRRRRRC

SEQ ID NO: 575 - protein, 19 aa, Artificial Sequence
  cationic component of the polymeric carrier
CRRRRRRRRRRRRRRRRRC

SEQ ID NO: 576 - protein, 20 aa, Artificial Sequence
  cationic component of the polymeric carrier
CRRRRRRRRRRRRRRRRRRC

SEQ ID NO: 577 - protein, 21 aa, Artificial Sequence
  cationic component of the polymeric carrier
CRRRRRRRRRRRRRRRRRRRC

SEQ ID NO: 578 - protein, 22 aa, Artificial Sequence
  cationic component of the polymeric carrier
CRRRRRRRRRRRRRRRRRRRRC

SEQ ID NO: 579 - protein, 14 aa, Artificial Sequence
  cationic component of the polymeric carrier
CRRRRRRRRRRRRC

SEQ ID NO: 580 - protein, 13 aa, Artificial Sequence
  cationic component of the polymeric carrier
CRRRRRRRRRRRR

SEQ ID NO: 581 - protein, 8 aa, Artificial Sequence
  cationic component of the polymeric carrier
CRRRRRRR

SEQ ID NO: 582 - protein, 9 aa, Artificial Sequence
  cationic component of the polymeric carrier
CRRRRRRRR

SEQ ID NO: 583 - protein, 10 aa, Artificial Sequence
  cationic component of the polymeric carrier
CRRRRRRRRR

SEQ ID NO: 584 - protein, 11 aa, Artificial Sequence
  cationic component of the polymeric carrier
CRRRRRRRRRR

SEQ ID NO: 585 - protein, 12 aa, Artificial Sequence
  cationic component of the polymeric carrier
CRRRRRRRRRRR

SEQ ID NO: 586 - protein, 14 aa, Artificial Sequence
  cationic component of the polymeric carrier
CRRRRRRRRRRRRR

SEQ ID NO: 587 - protein, 15 aa, Artificial Sequence
  cationic component of the polymeric carrier
CRRRRRRRRRRRRRR

SEQ ID NO: 588 - protein, 16 aa, Artificial Sequence
  cationic component of the polymeric carrier
CRRRRRRRRRRRRRRR

SEQ ID NO: 589 - protein, 17 aa, Artificial Sequence
  cationic component of the polymeric carrier
CRRRRRRRRRRRRRRRR

SEQ ID NO: 590 - protein, 18 aa, Artificial Sequence
  cationic component of the polymeric carrier
CRRRRRRRRRRRRRRRRR

SEQ ID NO: 591 - protein, 19 aa, Artificial Sequence
  cationic component of the polymeric carrier
CRRRRRRRRRRRRRRRRRR

SEQ ID NO: 592 - protein, 20 aa, Artificial Sequence
  cationic component of the polymeric carrier
CRRRRRRRRRRRRRRRRRRR

SEQ ID NO: 593 - protein, 21 aa, Artificial Sequence
  cationic component of the polymeric carrier
CRRRRRRRRRRRRRRRRRRRR

SEQ ID NO: 594 - RNA, 1621 nt, Artificial Sequence
  SP_Ipilimumab-HC
gggagaaagcuuaccauggagcugggccucagcuggaucuuccugcuggccauccucaagggggugcagugccaggugcagcuggucgagagcggcgggggcguggugcagcccgggcgcucccuccggcugagcugcgccgccuccggcuucaccuucagcuccuacaccaugcacuggguccgccaggcgccggggaagggccuggagugggugacguucaucagcuacgacggcaacaacaaguacuacgccgacuccgugaaggggcgguucaccaucagccgcgacaacuccaagaacacccucuaccugcagaugaacagccugcgggccgaggacaccgccaucuacuacugcgcccgcacgggcuggcucgggcccuucgacuacuggggccaggggacccuggucaccguguccagcgcguccaccaagggccccagcguguucccccuggccccguccagcaaguccacgagcggcgggaccgccgcccucggcugccuggucaaggacuacuuccccgagcccgugaccguguccuggaacagcggggcgcugaccagcggcguccacacguuccccgccgugcuccaguccagcggccuguacucccugagcuccguggucaccgugccgagcuccagccucgggacccagaccuacaucugcaacgugaaccacaagcccuccaacacgaaggucgacaagcggguggagcccaagagcugcgacaagacccacacgugcccgcccugccccgcccccgagcugcugggcgggcccuccguguuccucuucccgcccaagcccaaggacacccugaugaucagccgcacccccgaggugaccugcgucguggucgacgugucccacgaggacccggaggucaaguucaacugguacguggacggcguggagguccacaacgccaagaccaagccccgggaggagcaguacaacagcaccuaccgcgugguguccguccugacggugcuccaccaggacuggcugaacgggaaggaguacaagugcaaggugagcaacaaggcccugcccgcgcccaucgagaagaccaucuccaaggccaagggccagccgcgggagccccaggucuacacccucccgcccagccgcgacgagcugaccaagaaccaggugucccugacgugccucgugaagggcuucuaccccagcgacaucgccgucgagugggagagcaacgggcagcccgagaacaacuacaagaccacgcccccggugcuggacuccgacggcagcuucuuccuguacuccaagcucaccguggacaagagccgguggcagcaggggaacgucuucuccugcagcgugaugcacgaggcccugcacaaccacuacacccagaagucccugagccucucccccggcaagugaggacuaguuauaagacugacuagcccgaugggccucccaacgggcccuccuccccuccuugcaccgagauuaauaaaaaaaaaaaaaaaaaaaaaaaaaaaaaaaaaaaaaaaaaaaaaaaaaaaaaaaaaaaaaaaaugcaucccccccccccccccccccccccccccccccaaaggcucuuuucagagccaccagaauu

SEQ ID NO: 595 - RNA, 925 nt, Artificial Sequence
  SP_Ipilimumab-LC
gggagaaagcuuaccauggagacccccgcccagcugcucuuccugcugcuccuguggcugccggacaccacgggcgagaucgugcugacccagagccccggcacccucucccugagcccgggggagcgcgccacgcuguccugccgggccagccaguccgucggcagcuccuaccucgcgugguaccagcagaagcccgggcaggcgccccgccugcugaucuacggcgccuucagccgggccaccgggauccccgaccgcuucuccggcagcggcuccgggaccgacuucacccucacgaucagccggcuggagccggaggacuucgccguguacuacugccagcaguacggcuccagccccuggaccuucgggcagggcaccaagguggagaucaagcgcaccgucgccgcccccuccguguucaucuucccgcccagcgacgagcagcugaaguccgggacggccagcguggucugccuccugaacaacuucuacccccgggaggccaaggugcaguggaagguggacaacgcgcugcaguccggcaacagccaggagagcgucaccgagcaggacuccaaggacagcaccuacucccucagcuccacccugacgcugagcaaggccgacuacgagaagcacaagguguacgccugcgaggugacccaccagggccucuccagccccgucaccaaguccuucaaccgcggggagugcugaggacuaguuauaagacugacuagcccgaugggccucccaacgggcccuccuccccuccuugcaccgagauuaauaaaaaaaaaaaaaaaaaaaaaaaaaaaaaaaaaaaaaaaaaaaaaaaaaaaaaaaaaaaaaaaaugcaucccccccccccccccccccccccccccccccaaaggcucuuuucagagccaccagaauu

SEQ ID NO: 596 - RNA, 1003 nt, Artificial Sequence; identical to SEQ ID NO: 165
  Hs_CD40LG_v1(GCv3).1

SEQ ID NO: 597 - RNA, 667 nt, Artificial Sequence; identical to SEQ ID NO: 156
  PDCD1(21-150)

SEQ ID NO: 598 - RNA, 1849 nt, Artificial Sequence
  IL12B(1-328)_Linker_IL12A(23-219)
gggagaaagcuuaccaugugccaccagcagcuggugaucagcugguucucccucgucuuccuggccagcccccugguggccaucugggagcucaagaaggacguguacgucguggagcuggacugguacccggacgcgcccggcgagauggugguccugaccugcgacacccccgaggaggacgggaucacguggacccucgaccaguccagcgaggugcugggcuccgggaagacccugaccauccaggugaaggaguucggcgacgccgggcaguacacgugccacaagggcggcgagguccucagccacucccugcugcuccugcacaagaaggaggacgggaucuggagcaccgacauccugaaggaccagaaggagcccaagaacaagaccuuccuccgcugcgaggccaagaacuacuccggccgguucacgugcugguggcugaccaccaucagcaccgaccugaccuucuccgucaagagcucccgcgggagcuccgacccgcagggcgugacgugcggggccgccacccucagcgcggagcgggugcgcggcgacaacaaggaguacgaguacuccguggagugccaggaggacagcgccugccccgccgccgaggagucccugcccaucgaggugauggucgacgcggugcacaagcugaaguacgagaacuacaccagcagcuucuucauccgggacaucaucaagcccgacccgcccaagaaccuccagcugaagccccugaagaacucccgccagguggaggucagcugggaguaccccgacaccugguccacgccgcacagcuacuucucccucaccuucugcguccaggugcagggcaagagcaagcgggagaagaaggaccgcguguucaccgacaagaccuccgccacggugaucugccggaagaacgccagcaucuccgugcgcgcccaggaccgguacuacagcuccagcugguccgagugggccagcguccccugcuccggcaguacuucgggcagugguaagccugguaguggugaggguaguacuaagggucggaaccugccgguggccacccccgaccccggcauguuccccugccugcaccacagccagaaccuccugcgcgccguguccaacaugcugcagaaggcccggcagacgcucgaguucuacccgugcaccagcgaggagaucgaccacgaggacaucaccaaggacaagaccuccacggucgaggccugccugccccuggagcucaccaagaacgagagcugccugaacucccgcgagaccagcuucaucaccaacggguccugccuggcgagccggaagacguccuucaugauggcccucugccugagcuccaucuacgaggaccugaagauguaccagguggaguucaagaccaugaacgccaagcuccugauggaccccaagcgccagaucuuccuggaccagaacaugcucgccgugaucgacgagcugaugcaggcgcugaacuucaacagcgagaccgucccccagaaguccagccucgaggagccggacuucuacaagaccaagaucaagcugugcauccugcuccacgccuuccggauccgcgccgugacgaucgaccgggugauguccuaccugaacgccagcugaggacuaguuauaagacugacuagcccgaugggccucccaacgggcccuccuccccuccuugcaccgagauuaauaaaaaaaaaaaaaaaaaaaaaaaaaaaaaaaaaaaaaaaaaaaaaaaaaaaaaaaaaaaaaaaaugcaucccccccccccccccccccccccccccccccaaaggcucuuuucagagccaccagaauu

SEQ ID NO: 599 - RNA, 867 nt, Artificial Sequence
  PDCD1
augcaaaucccccaagcccccuggcccguaguaugggccguacuccagcucggcuggcgacccggcugguuccucgacucccccgaccgccccuggaacccacccacauucucacccgcacuacucguagucaccgaaggcgacaacgccaccuucaccugcuccuucuccaacaccucggaauccuuuguacucaacugguaccgcaugagcccguccaaccaaaccgacaaacucgccgcauuccccgaagaccgcagccaacccggacaagacugccgauuccgcgucacccaacuaccuaacgguagagacuuccacaugucagucguccgcgcccgccgaaacgacuccgguaccuaccuaugcggagccauaucccuugcccccaaagcacaaaucaaagaaucccuacgagccgaacuccgagucaccgaacgccgagccgaagucccaaccgcacaccccucccccuccccccgaccagccggccaauuccaaacccuaguagucggcguaguaggcggccuccuaggcucacucguacuccucgucuggguacuagcagucaucugcucacgagccgcccgaggcaccaucggagcccgacgaaccggccaaccacucaaagaagaccccuccgccguaccagucuucucagucgacuacggugaacucgacuuucaauggagagaaaaaacccccgaacccccaguccccugcguccccgaacaaaccgaauacgccacaaucgucuucccaucaggcaugggcaccucaucccccgcccgccgaggcuccgccgacggaccccgcuccgcccaaccccuccgacccgaagacggccacugcuccuggccccucuaa

SEQ ID NO: 600 - RNA, 450 nt, Artificial Sequence
  PDCD1(1-149)
augcaaaucccccaagcccccuggcccgucgucugggccguccuccaacucggcuggcgacccggcugguuccucgacucccccgaccgccccuggaacccucccaccuucucccccgcccuccucgucgucaccgaaggcgacaacgccaccuucacaugcuccuucuccaacaccuccgaauccuucguccucaacugguaccgcaugucccccuccaaccaaaccgacaaacucgccgccuuccccgaagaccgcucacaacccggccaagacugccgcuuccgagucacccaacuacccaacggccgcgacuuccacauguccgucguccgcgcccgacgcaacgacuccggcaccuaccuaugcggcgccaucucccucgcccccaaagcccaaaucaaagaaucccuccgcgccgaacuacgugucaccgaacgccgagccuaa

SEQ ID NO: 601 - RNA, 660 nt, Artificial Sequence
  IL12A
augugccccgcccgcucccuccuccucgucgccacacucguccuccucgaucaccucucacucgcacgaaaccuaccagucgccacccccgaccccggcauguuccccugccuccaccacucccaaaaccuccuccgcgccgucuccaauaugcuccaaaaagcccgccaaacccucgaauucuaccccugcacauccgaagaaaucgaccacgaagacaucaccaaagacaaaaccuccaccgucgaagccugccucccccuugaacucaccaaaaacgaauccugccuaaacucacgcgaaaccuccuucaucaccaacggaucaugccucgccucccgcaaaaccuccuucaugauggcccucugccucuccuccaucuacgaagaccucaaaauguaccaaguagaauucaaaaccaugaacgccaaacuccucauggaccccaaacgccaaaucuuccucgaccaaaacaugcucgccgucaucgacgaacucaugcaagcccucaacuucaacucagaaaccgucccccaaaaaucaucccucgaagaacccgacuucuacaaaaccaaaaucaaacuaugcaucuuacuccacgccuuccggaucagagcagucaccaucgaccgcgucauguccuaccuaaacgccuccuaa

SEQ ID NO: 602 - RNA, 657 nt, Artificial Sequence
  IL12A(1-219)
augugccccgcccgcucucuccuccucguagcaacccucguccuccucgaccaccucucccuagcccgaaaccuccccgucgccacccccgacccaggcauguuccccugccuccaccacucccaaaaccuccuccgagccgucuccaacaugcuccaaaaagcccgccaaacccucgaauucuaccccugcaccuccgaagaaaucgaccacgaagacaucaccaaagacaaaaccuccaccgucgaagccugccucccccucgaacucaccaaaaacgaaucaugccucaacucccgcgaaaccuccuucaucaccaacggcuccugccuagccucccgcaaaaccuccuucaugauggcccucugccucucauccaucuacgaagaccuaaaaauguaccaagucgaauucaaaaccaugaacgccaaacuccucauggacccaaaacgccaaaucuuccuagaccaaaacaugcucgccgucaucgacgaacucaugcaagcccucaacuucaacuccgaaaccguaccccaaaaauccucacucgaagaacccgacuucuacaaaacaaaaaucaaacucugcauacuccuccacgccuuccgcauccgcgccgucaccaucgaucgagucauguccuaccucaacgccucc

SEQ ID NO: 603 - RNA, 594 nt, Artificial Sequence
  IL12A(23-219)
cgcaaccuccccgucgccacccccgaccccggcauguuccccugccuccaccacucccaaaaucuccuccgcgccgucuccaacaugcuccaaaaagcccgccaaacccucgaauucuaccccugcacguccgaagaaaucgaccacgaagacaucaccaaagacaaaaccuccaccgucgaagccugccucccccucgaacucaccaaaaacgaauccugccucaacucacgcgaaaccuccuucaucaccaacggcucaugccucgccucacgaaaaaccuccuucaugauggcccucugccucuccucaaucuacgaagaccucaaaauguaccaagucgaauucaaaaccaugaacgccaaacuccucauggaccccaaacgccaaaucuuccucgaccaaaacaugcucgcagucaucgacgaacucaugcaagcccucaacuucaacuccgaaaccgucccccaaaaaucaucccucgaagaaccagacuucuacaaaaccaaaaucaaacucugcauccuccuccacgccuuccgcauccgcgccguaaccaucgaccgcgucaugucauaccucaacgccuccuaa

SEQ ID NO: 604 - RNA, 987 nt, Artificial Sequence
  IL12B
augugccaccaacaacucgucaucuccugguucucccucgucuuccucgccucuccccucgucgccauaugggaacucaagaaggacgucuacguaguagaacucgacugguacccagacgcccccggagaaauggugguccucaccugcgacacccccgaagaagacggcaucaccuggacauuagaccaaucguccgaaguucucggcuccggcaaaacacucacaauccaaguaaaagaauucggcgacgccggacaauacaccugccacaaaggcggagaaguacuaucccacucacuccuacuccuacacaaaaaagaagacggcauauggagcaccgacauccucaaagaccaaaaagaacccaaaaacaaaaccuuccuccgaugcgaagccaaaaacuacuccggccgcuucaccugcugguggcucaccacaauauccaccgaccucaccuucuccgucaaaucaucucgcggcuccagcgacccccaaggcgucaccugcggcgccgccacccucucagccgaacgcguacgcggugacaacaaagaauacgaauacagcguagaaugccaagaagacuccgccugucccgccgcagaagaaucacuccccaucgaagucaugguagacgcaguacacaaacucaaauacgaaaacuacaccuccuccuucuucauccgcgacaucaucaaacccgaccccccaaaaaaccuacaacucaaaccccuuaaaaacucccgccaagucgaagucuccugggaauacccagacacaugguccaccccccacuccuacuucucccucaccuucugcguccaaguccaaggcaaauccaaacgcgaaaaaaaagaccgaguauucaccgacaaaaccucagccaccgucaucugcagaaaaaacgccuccaucuccguccgagcccaagaccgcuacuacuccuccuccugguccgaaugggcauccguccccugcucauaa

SEQ ID NO: 605 - RNA, 984 nt, Artificial Sequence
  IL12B(1-328)
augugccaccaacaacucgucaucagcugguucagccucgucuuccucgccuccccccuaguagccauaugggaacuaaaaaaagacguauacguuguagaacuagacugguaccccgacgcacccggcgaaauggucguccucaccugcgacacccccgaagaagauggcauaacauggacccucgaccaauccucagaaguccucggcuccggcaaaacccucacaauccaagucaaagaauucggcgacgccggccaauacaccugccacaaaggcggcgaaguccucucucacucucuccuccuccuccacaaaaaagaagacggcaucugguccaccgacauacucaaagaccaaaaagaacccaaaaacaaaaccuuccugcgaugcgaagccaaaaacuacuccggccgauucacaugcugguggcucaccaccaucucaaccgaccucaccuucuccgucaaauccucccguggcagcuccgacccccaaggagucaccugcggcgcagccacccucuccgccgaacgcgucagaggcgacaacaaagaauacgaauacuccgucgaaugccaagaggacuccgccugccccgccgccgaagaaucacuccccaucgaagucaugguagacgccguacacaaacuaaaauacgaaaacuacaccucuucauucuucauccgagacaucaucaaacccgacccccccaaaaaccuccaacucaaaccccucaaaaacucccgacaagucgaagucagcugggaauacccagacaccugguccaccccacacuccuacuucucacuaaccuucugcguccaaguccaaggcaaaucgaaacgcgaaaaaaaagacagagucuucaccgacaaaaccucagccaccgucaucugccgaaaaaacgcaucaaucagcguccgcgcccaagaccgcuacuacuccuccagcuggagcgaaugggcauccguccccugcucc

SEQ ID NO: 606 - RNA, 921 nt, Artificial Sequence
  IL12B(23-328)
aucugggaacucaaaaaagacgucuacguagucgaacucgacugguacccagacgcccccggcgaaauggucguccucaccugcgacacacccgaagaagacggcaucaccuggacacucgaccaauccuccgaaguacucggcuccggcaaaacccucacaauccaagucaaagaauucggcgacgccggccaauacaccugccacaaaggcggcgaaguccucucccacucccuccuccuacuccacaaaaaagaagacggcaucugguccacagacauccucaaagaccagaaagaacccaaaaacaagaccuuccuacgaugcgaagccaaaaacuacagcggccgauucaccugcugguggcucacaaccaucagcaccgaccuaaccuucuccguaaaauccuccagaggauccagcgacccccaaggcgucacaugcggcgccgcaacccuauccgcagagcgaguacgaggcgacaacaaagaauacgaauacuccguagaaugccaagaagacuccgcaugcccugccgccgaagaaagccuccccaucgaagucauggucgacgcaguccacaaacucaaauacgaaaacuacacaagcucuuucuucauacgcgacaucaucaaacccgaccccccaaaaaaccuacaacucaaaccccuaaaaaacucccggcaagucgaagucagcugggaauaccccgacaccugguccaccccccauuccuacuucucccucacauucugcguacaaguccaaggcaaaaguaaacgcgagaaaaaagaccgcgucuucaccgacaaaaccagcgcaaccgucaucugccgcaaaaacgccagcaucagcguacgagcccaagaccgcuacuacucaagcucaugguccgaaugggccuccguccccugcucauaa

SEQ ID NO: 607 - RNA, 54 nt, Artificial Sequence; identical to SEQ ID NO: 130
  Linker-sFvCC49-218

SEQ ID NO: 608 - RNA, 1632 nt, Artificial Sequence
  IL12
augugccaccaacaacucgugaucuccugguucucccucguuuuccucgcaucaccccucguugcuauaugggaacucaagaaagacgucuacgucgucgaacucgacugguacccggacgcccccggcgaaauggucguccuaaccugcgauacacccgaagaagacggcaucaccuggacccucgaccaguccucugaaguccuaggauccggcaaaacccuuacaauccaagucaaagaguucggcgacgccggccaguacacaugccacaaaggcggcgagguccugagccauuccuuacuccuccuacacaagaaagaagacggcaucugguccaccgacauacuaaaagaccaaaaagaacccaaaaacaaaaccuuccuacgaugcgaagccaaaaacuacucaggccgauucaccuguugguggcucaccacgaucagcaccgaccuaacauucucaguaaaauccucacgcggcuccagcgacccacaaggcgucacaugcggggccgccacccuauccgccgaacgagucaggggcgacaacaaagaauacgaauacagcguagaaugccaagaagacuccgccugccccgcggccgaagagucccuacccauagaggucauggucgacgccguccacaaacucaaauacgagaacuacaccuccagcuucuucauccgcgacauaaucaaaccagacccacccaaaaaccuacaacuaaaaccacucaaaaauucgcgccaggucgaagucucuugggaauacccggacaccuggucaaccccacacuccuacuucagccuaaccuucugcguccaaguccaaggcaaauccaaacgcgaaaagaaagaccgaguauucacagacaaaaccucagcaacgguaaucugccgcaaaaacgccuccaucucagucagggcccaagaccgauacuacuccuccucauggagcgagugggcaucuguaccaugcagcgggagcacauccggauccggaaaacccggcuccggcgaaggaagcaccaaagguagaaaccuuccaguagccacccccgacccugguauguuucccugccuccaccauagccaaaaccuccuacgagcagucuccaacaugcuccaaaaagcacgacaaacccuugaguucuacccaugcacauccgaagaaauagaccacgaagacaucacaaaggacaaaaccuccacagucgaagccugccucccacuugaacucaccaaaaacgaaucaugccuaaacucccgcgaaaccucuuucaucaccaauggaucaugccucgcaucccgcaaaacaucguucaugauggcacucugccugucaagcaucuacgaagaccucaaaauguaccaaguugaguucaagacaaugaacgcaaaacuccucauggacccuaaacgccaaauauuccucgaccaaaacaugcucgccgugauagacgaacucaugcaagcacuaaacuucaacagcgaaacagucccccaaaaauccagccucgaagaacccgacuucuacaaaaccaaaaucaaacuaugcauccuccuccacgccuucagaaucagggccgugaccaucgacagagucauguccuaccucaacgccucguaa

SEQ ID NO: 609 - RNA, 786 nt, Artificial Sequence
  CD40LG
augaucgaaacauacaaccaaacauccccccgauccgccgcaacaggccuccccaucuccaugaaaauauucauguaccuccucacaguauuccucauaacccaaaugaucggaucagcacuauucgccgucuaccuccaccgccgccucgacaaaaucgaagacgaacgcaaccuccacgaagacuucgucuucaugaaaaccauccaacgcugcaacaccggagaacgaucccuaucccuccucaacugcgaagagaucaaaucccaauucgaaggcuucgucaaagacaucaugcucaacaaagaagaaaccaaaaaagaaaacuccuucgaaaugcaaaaaggcgaccaaaacccccaaaucgccgcccacgucaucuccgaagccuccuccaaaacaaccuccguucuccaaugggccgagaaaggcuacuacacuauguccaacaaccucgucacccucgaaaacggcaaacaacucaccgucaaacgccaaggccucuacuacaucuacgcccaagucacauucugcuccaaccgcgaagcauccagccaagcccccuucaucgccucacucugccucaaaucccccggccgauucgaacgcauccuccuacgcgccgccaacacccacuccucagccaaacccugcggccaacaauccauccaccuaggcggcgucuucgaacuccaacccggugccuccgucuuugucaacguaaccgaccccucccaagucucccacggcaccggauucacauccuucggccuccucaaacucuaa

SEQ ID NO: 610 - RNA, 867 nt, Artificial Sequence
  PDCD1
augcagauaccacaagcaccauggccaguaguaugggcaguauuacaauuaggauggagaccaggaugguuuuuagacucaccagauagaccauggaauccaccaacauuuucaccagcauuauuagucguaacagaaggagacaaugcaacauuuacauguucauuuucaaauacaucagaaucuuuuguauuaaauugguauagaaugucaccaaguaaucaaacagauaaauuagcagcauuuccagaagauagaucacaaccaggacaagauuguagauuuagaguaacacaauuaccuaaugguagagauuuucauaugucaguaguaagagcaagacgaaaugauagcggaacauauuuauguggagcaauaucauuagcaccaaaagcacaaauaaaagaaaguuuaagagcagaacuaagaguaacagaaagaagagcagaaguaccaacagcacauccaucuccaaguccaagaccagcaggacaauuucaaacauuaguaguuggaguaguaggaggacuacuaggaucauuaguauuacuaguauggguacuagcuguaauauguucaagagcagcaagaggaacaauaggugcaagaagaacaggacaaccacuuaaagaagacccuucagccguaccuguauuuaguguagauuauggagaauuagauuuccaauggagagaaaaaacaccagaaccaccuguaccaugcguaccagaacaaacagaauacgcaacaauaguuuucccaucaggaaugggaacuagcucacccgcaagaagaggaucagcagauggaccaagaucagcacaaccacuaagacccgaagauggacauuguucauggccauuauaa

SEQ ID NO: 611 - RNA, 450 nt, Artificial Sequence
  PDCD1(1-149)
augcaaauaccccaagcaccauggccaguaguaugggcaguauuacaacuaggauggagaccaggaugguucuuagacucaccagacagaccauggaacccaccaacauucucaccagcacuauuaguaguaacagaaggagacaacgcaacauucacaugcucauucucaaacacaucagaaucauucguauuaaacugguacagaaugucaccaucaaaccaaacagacaaacuagcagcauucccagaagacagaucacaaccaggacaagacugcagauucagaguaacacaacuaccaaacggaagagacuuccacaugucaguaguaagagcaagaagaaacgacucaggcaccuaccuaugcggagcaauaucacuagcaccaaaagcacaaauaaaagaaucacuaagagcagaacuaagaguaacagaaagacgagcauaa

SEQ ID NO: 612 - RNA, 660 nt, Artificial Sequence
  IL12A
augugcccagcaagaucacuacuacuaguagcaacacuaguacuacuagaccaccuaucccuagcacgaaaccuaccaguagcaacaccugacccaggaauguucccaugccuccaccacucccaaaaccuauuacgagcagucucaaacaugcuacaaaaagcacgacaaacacuagaauucuacccaugcacaucagaagaaauagaccacgaagacauaacaaaagacaaaacaucaacaguagaagcaugccuaccacuagaacucacaaaaaacgaaucaugccuaaacucuagagaaacaucauucauaacaaacggaucaugccuagccuccagaaaaacaucauucaugauggccuuaugccuaucaucaauauaugaagaccuaaaaauguaccaagucgaauucaaaacaaugaacgcaaaacuacuaauggacccaaaaagacaaauauuccuagaccaaaacaugcucgcaguaauagaugaacuaaugcaagcacuaaacuucaacucagaaaccgucccccaaaaauccucacuagaagaacccgacuucuacaaaacaaaaauaaaauuaugcauacuauuacacgcauuuagaauaagagcaguaacaauagacagaguaaugucauaccuaaacgcauccuaa

SEQ ID NO: 613 - RNA, 657 nt, Artificial Sequence
  IL12A(1-219)
augugcccagcaagaucauuacuacuaguagccacacuaguccuccuagaccaccuaucacuagcaagaaaccuaccaguagcaacaccagacccaggaauguucccaugccuacaccacucacaaaacuuacuaagagcaguaucaaacaugcuacaaaaagcaagacaaacacuagaauucuacccaugcacaucagaagaaauagaucaugaagacauaacaaaagacaaaacauccacaguagaagcaugccuaccacuagaacuaacaaaaaacgaaucaugccuaaacucacgagaaaccucauucauaacaaacggaucaugccuagcaucacgaaaaaccucauucaugauggcacuaugccuaucauccauauacgaagaccuaaaaauguaccaaguagaauucaaaacaaugaacgcaaaacuccucauggacccaaaaagacaaauauuccuagaccaaaacaugcuagcaguuauagacgaacuaaugcaagcacuaaacuucaacucagaaaccguaccacaaaaaucaucacuagaagaaccagacuuuuacaaaaccaaaauaaaacuaugcauacuacuacacgcauucagaauaagagcaguaacaauagacagaguaaugucuuaccuaaacgcauca

SEQ ID NO: 614 - RNA, 594 nt, Artificial Sequence
  IL12A(23-219)
agaaaccuaccaguagcaacacccgacccaggaauguucccaugccuacaccacucacaaaaccuacuacgcgcaguaucaaacauguuacaaaaagcacgacaaacacuugaauucuaccccugcacaucagaagaaauagaccacgaagacauaacaaaagacaaaacauccaccguagaagcaugccucccacuagaacuaacaaaaaacgaaucaugccuaaacucaagagaaacaucauucauaacaaacggaucaugccuagcaucacgaaaaacaucauucaugauggcacuaugccuauccuccauauacgaagaccuaaaaauguaccaaguagaauucaaaacaaugaacgcaaaacuacuaauggacccaaaaagacaaauauuccuagaccaaaacaugcucgcaguaauagacgaacuaaugcaagcacuaaacuuuaacucagaaacaguaccccaaaaaucaucacuagaagaaccagacuucuacaaaacaaaaauaaaauuaugcauacuccuacacgcauucagaaucagagcaguaacaauagaccgcguaaugucauaccuaaacgcaucauaa

SEQ ID NO: 615 - RNA, 987 nt, Artificial Sequence
  IL12B
augugccaucaacaacuaguaaucucaugguucagccuaguauucuuagccaguccauuaguagcaauaugggaauuaaaaaaagauguauacguuguggaacuagacugguauccugacgcaccaggagaaaugguuguacuaacaugugauacacccgaagaagacggaauaacauggacacuagaccaaucaucagaaguauuaggcucaggaaaaacauuaacaauacaaguaaaagaauucggagacgccggacaauacacaugccacaaaggaggcgaaguauuaucacauucauuauuacuacuacacaaaaaagaagacggcaucuggucaacagacauauuaaaagaccaaaaagaaccuaaaaacaaaacauucuuaagaugcgaagcaaaaaacuacaguggaagauucacaugcugguggcugacaacaauaucaacagaucuaacauuuucaguaaaaucaucaagaggaucaucagauccacaaggcguaacaugcggagccgcaacacuaagcgcagaaagagucagaggagacaacaaagaauacgaauauucaguagaaugucaagaagauucagcaugcccugcagcagaagaaucacuaccaauagaagucaugguagaugcaguacacaaacuaaaauaugaaaacuacacaucaagcuucuuuauaagagacauaaucaaaccagacccaccaaaaaaccuacaacuaaaaccauuaaaaaacucacgacaaguagaaguaagcugggaauacccagacacguggucgaccccacacucauacuucagcuuaacauuuugcguacaaguacaaggaaaaucaaaaagagaaaaaaaagaccgaguauuuacagacaaaacaucugcaacaguaauaugccgaaaaaacgcaucaauaucuguaagagcacaagacagauauuacucaucaucauggagugaaugggcaagcguaccaugcucauaa

SEQ ID NO: 616 - RNA, 984 nt, Artificial Sequence
  IL12B(1-328)
augugccaucaacaacuaguaauaucaugguucucacuaguauucuuagcaaguccccuaguagcaauaugggaacuaaaaaaagacgucuacguuguagaauuagacugguacccagacgcaccaggcgaaaugguaguacuaacaugcgauacaccagaagaagacggaauaacauggacacuagaccaaucaucagaaguucuaggaucaggaaaaacauuaacaauacaaguaaaagaauucggggacgcaggacaauauacaugccacaaaggaggagaaguuuuaucacacucacuacuauuauuacacaaaaaagaagacggaauauggucaacugacauacuaaaagaucaaaaagaaccaaaaaacaaaacauucuuaagaugugaagcaaaaaauuacaguggaagauucacaugcugguggcuaacaacaauaaguacagaccuaacauuuucaguaaaaucaaguagaggaucaucagacccacaaggcguaacauguggagcagcaacacuaucagcagaacgagucagaggagacaacaaagaauacgaauacuccguagaaugccaagaagacagugcaugccccgcagccgaagaaucauuaccaauagaaguaaugguagacgcaguacacaaacuaaaauacgaaaacuacacaagcucauucuuuauacgagauauaauaaaaccagacccaccaaaaaaccuacaacuaaaaccacuaaaaaacucacgccaaguagaaguauccugggaauacccagauacauggucaacaccacacucauauuucagcuuaacauucuguguacaaguacaaggaaaaucaaaaagagaaaaaaaagauagaguauucaccgacaagacaagcgcaacaguaauuuguagaaaaaacgcaucaauaucaguaagagcacaagacagauacuacagcucaagcuggucagaaugggcaaguguaccauguuca

SEQ ID NO: 617 - RNA, 921 nt, Artificial Sequence
  IL12B(23-328)
auaugggaauuaaaaaaagacguauacguaguagaacuagauugguacccagaugcaccaggagaaaugguuguauuaacaugcgacacaccagaagaagauggaauaacauggacacuagaccaaaguagugaaguacuaggaagcggcaaaacauuaacuauacaaguaaaagaauucggagacgcaggacaauauacaugucacaaaggaggagaaguccuaucccacaguuuauuauuauuacacaaaaaagaagacggaauauggaguacagauauacuaaaagaccaaaaagaacccaaaaacaaaacauuucuaaggugcgaagcaaaaaacuauucaggaagauuuacauguugguggcuaacuacaauaucaacagaccucacauuuucaguaaaauccaguagaggaaguucagauccacaaggaguaacauguggagcagcaacacuaucagcagaaagaguaagaggagacaauaaagaauaugaauauucaguagaaugccaagaagauagcgcuugcccagcagcagaagaaagccuuccaauagaaguaaugguagacgcaguucacaaauuaaaauaugaaaauuacaccagcucauucuuuauaagagacauaauaaaaccagauccaccaaaaaauuuacaacuaaaaccauuaaaaaauucaagacaaguagaaguaagcugggaauacccagauacauggagcaccccacacucauacuucucauuaacauuuuguguacaaguacaaggaaaaagcaaaagagaaaaaaaagacaggguauucacagauaaaacaagcgcaacaguaauauguagaaaaaacgcaucaauaagcguaagagcacaagauagauauuacucaucaucauggucagaaugggcauccguaccaugcucauaa

SEQ ID NO: 618 - RNA, 54 nt, Artificial Sequence; identical to SEQ ID NO: 97
  Linker-sFvCC49-218

SEQ ID NO: 619 - RNA, 1632 nt, Artificial Sequence
  IL12
augugccaccaacaacuaguuauaucaugguuuucacuaguauuucuagccucaccacucguagccauaugggaacuaaaaaaggacguauacguuguagaacucgacugguacccagaugcaccaggcgaaaugguaguacuuacaugcgauacacccgaagaagacggaaucacauggacauuagaucaaucaucagaaguacuaggauccggcaaaacauuaacaauacaaguaaaagaauucggcgaugccggacaauauacaugccacaaaggaggagaaguauuaagucacucacuacuuuuacuucauaaaaaagaagacgguauuuggucaacagacauacuuaaagaucaaaaggaaccaaaaaacaaaacauuccuacgaugcgaagcaaagaauuauucgggccgauucacaugcugguggcuaacaacaauuuccacagaccuaacauucucaguuaaguccucaagaggaaguuccgauccacaaggaguaacauguggcgccgcaacauuaagcgcagaacgcguaagaggagauaacaaagaauacgaauacucaguagaaugccaagaggacuccgccuguccagcagccgaagaaucuuuaccaauagaaguaaugguagaugcaguacauaaacuaaaauacgaaaacuauacgucaucauucuuuauaagagauauaaucaaaccagacccaccuaaaaaucuacaacuaaaaccccuaaaaaauucacgacaaguagagguuucaugggaauauccagauacauggucaacaccacacagcuacuuuaguuuaacauucuguguacaaguccagggaaaaucaaaaagagaaaaaaaagacagaguauuuaccgacaaaacauccgcaacaguaauauguagaaaaaaugcauccauaucaguacgagcacaagaccgauacuauucaucaaguuggucagaaugggcaucaguaccuugcuccggaaguaccucaggcaguggaaaaccaggaucaggagaaggaucaaccaaaggaagaaaccuaccaguagcaacaccugacccaggcauguucccuugcuuacaucacucacaaaaccuacuacgagcugugucaaauauguuacaaaaagcaagacaaaccuuagaauuuuauccaugcacaucagaagaaaucgaccaugaagacauaaccaaagacaaaacaagcacaguugaagccuguuuaccauuagaacucacgaaaaacgaauccugucucaacucaagagaaacaucauuuauaacaaauggcucaugccuugccucacguaaaacaucauucaugauggcacuaugccuuucauccauauacgaagaccuaaaaauguaccaaguagaauucaaaacaaugaaugcaaaauuacuaauggacccaaaaagacaaauauuuuuagaccaaaacauguuagcaguaauagacgaauuaaugcaagccuuaaacuucaauucagaaacaguaccccaaaaaucaagcuuagaagaaccagacuuuuauaaaacuaaaauaaaacuaugcauccuauuacacgcuuuuagaauaagagcaguuacaauagacagagucaugagcuaucuaaaugcaucauga

SEQ ID NO: 620 - RNA, 786 nt, Artificial Sequence
  CD40LG
augauagaaacauacaaucaaaccuccccaagauccgcagcaacaggacuaccaauaucaaugaaaauauucauguacuuacuaacaguauuccucauaacacaaaugauaggauccgcacuuuucgcaguauaccuacacagaagauuagacaaaauagaagacgaacgaaaccuacacgaagacuucguauuuaugaaaacuauacaacgcugcaacacaggagaaagaucucuaucucuauuaaacugcgaagaaaucaaaucacaauuugaaggauuuguaaaagacauaaugcuaaacaaagaagaaaccaaaaaagaaaacucauucgaaaugcaaaaaggagaccaaaacccacaaauagcagcccacgucauauccgaagcaagcucaaaaacaaccucaguacuacaaugggcagaaaaaggauacuacacaaugucaaacaaccuaguaacccuagaaaacggaaaacaacuaacagucaaaagacaaggacuauacuacauauacgcacaaguaacauucugcucaaacagagaagcaucaucccaagcacccuucauagcaucacuaugccucaaaucaccaggaagauucgaacgaauacuauuaagagcugcaaacacacauucaucagcaaaaccauguggacaacaaucaauacaccuaggaggaguauucgaauuacaaccaggagcaucaguauucguaaauguuacugaccccucacaagucucacacggaacaggauucacaucauucggacuauuaaaacuauaa

SEQ ID NO: 621 - RNA, 867 nt, Artificial Sequence
  PDCD1
augcaaauaccacaagcaccauggccaguaguaugggcaguacuacagcuagguuggagaccaggaugguuucuagauucaccagauagaccauggaauccaccuacauuuucacccgcauuauuaguaguaacugaaggagacaaugcaacauuuacaugcucauuuucaaauacaucugaaagcuuuguauuaaauugguauagaaugagccccucaaaucaaacagauaaauuagcagcauucccagaagauagaucacaacccggacaagauuguagauuuagaguuacacaacuaccaaauggaagagauuuucauaugucaguaguaagagcaagaagaaaugauagcggaacauauuuauguggagcaauaagcuuagcaccaaaagcacaaauaaaagaaaguuuaagagcagaauuaagaguaacagaaagaagagcagaaguaccaaccgcacauccaucaccaaguccaagaccagcuggucaauuccaaacuuuaguaguaggaguaguaggaggacuauuaggaaguuuaguauuauuaguauggguacuagcaguaauauguucaagagcagcaagaggaacaauaggugcaagaagaacaggacaaccauuaaaagaagacccaucagcuguaccaguuuuuucaguagauuauggagaacuugauuuucaauggagagaaaaaacuccugaaccaccaguaccauguguuccagaacaaacugaauaugcuacaauagucuucccaucaggaaugggaacaaguaguccagccagaagaggaucagcagauggaccaagaucagcacaaccauuaagaccagaagacggacacuguagcuggccacuauaa

SEQ ID NO: 622 - RNA, 450 nt, Artificial Sequence
  PDCD1(1-149)
augcaaauaccacaagcaccauggccaguaguaugggcaguacuacaacuaggauggagaccaggaugguucuuagacucaccagacagaccauggaacccaccaacauucucaccagcacuacuaguaguaacagaaggagauaacgcaacauucacaugcucauucaguaacacaucagaaucauucguauuaaacugguacagaaugucaccaucaaaccaaacagacaaacuagcagcauucccagaagacagaucacaaccaggacaagacugcagauucagaguaacacaauuaccaaacggaagagacuuccacaugucaguaguaagagcaagaagaaaugacucaggaacauaccuaugcggagcaauaucacuagcaccaaaagcacaaauaaaagaaucacuaagagcagaauuaagaguaacagaaagaagagcauaa

SEQ ID NO: 623 - RNA, 660 nt, Artificial Sequence
  IL12A
augugcccagcaagaucacuacucuuaguagcaacacuagucuuacuagaccaccuaucacuagcaagaaaccuaccaguagcaacaccagacccaggaauguucccaugccuacaccauucacaaaauuuauuaagagcaguauccaacaugcuacaaaaagcaagacaaacauuagaauucuacccaugcacauccgaagaaauagaccacgaagacauaacaaaagacaaaacaucuacaguagaagcaugccuaccacuagaacuaacaaaaaacgaaucaugccuaaacucaagagaaacaucauucaucacaaacggcuccugcuuagcaucaagaaaaacaucauucaugauggcacuaugccuaucaucaauauacgaagaccuaaaaauguaccaaguagaauucaaaacaaugaacgcaaaacuacuaauggacccaaaaagacaaauauuccuagaccaaaacaugcuagcaguaauagaugaacuaaugcaagcacuaaacuucaacucagaaacaguaccccaaaaaucaucacuagaagaaccagacuucuacaaaacaaaaauaaaacucugcauacuacuacacgcauucagaauaagagccguaacaauagacagaguaaugucauaccuaaacgcaucauaa

SEQ ID NO: 624 - RNA, 657 nt, Artificial Sequence
  IL12A(1-219)
augugcccagccagaucacuauuacucguagcaacauuaguauuacuagaccaccuaucacuagcaagaaaccuacccguagcaacacccgacccaggaauguuccccugccuacaucacucccaaaaccuacuaagagcaguaucaaacauguuacaaaaagcacgacaaacacuagaauucuaccccugcacaucagaagaaauagaccacgaagacauaacaaaagacaaaacaucaacaguagaagcaugccucccacuagaacuaacaaaaaacgaaucaugccuaaacucaagagaaacaucauucauaacaaacggaucaugccuagcaucaagaaaaacaucauucaugauggcacuaugccuaucaucaauauacgaagaccuaaaaauguaccaaguagaauucaaaacaaugaacgcaaaacuauuaauggacccaaaaagacaaauauuccuagaccaaaacaugcucgcaguaauagacgaacuaaugcaagcacuaaacuucaacuccgaaacaguaccccaaaaaucaucacucgaagaaccagacuuuuacaaaacaaaaauaaaacuaugcauacuacuacacgcauucagaauaagagcaguaacaauagacagaguaaugucauaccuaaacgccuca

SEQ ID NO: 625 - RNA, 594 nt, Artificial Sequence
  IL12A(23-219)
agaaaccuaccaguagcaacaccagaccccggaauguucccaugccuccaccacucacaaaaccuacuaagagcaguaucaaacauguuacaaaaagccagacaaacauuagaauuuuacccauguacaucagaagaaauagaccacgaagacauaacaaaagacaaaacaucaacaguagaagcaugccuaccauuagaacuaaccaaaaacgaaucaugccuaaacucaagagaaacaucauucauaacaaacggaucaugccuagcaucaagaaaaacaucauucaugauggcacuaugccuaucauccauauacgaagaccuaaaaauguaccaaguagaauuuaaaacaaugaacgcaaaacuccuaauggacccaaaaagacaaauauuccuagaccaaaauaugcucgcaguaauagacgaauuaaugcaagcacuaaacuucaacucagaaacaguaccacaaaaaucaucccuagaagaacccgacuucuacaaaacaaaaauaaaacuaugcauacuacuacacgcauucagaauaagagccguaacaauagacagaguaaugucauaccuaaacgcaucauaa

SEQ ID NO: 626 - RNA, 987 nt, Artificial Sequence
  IL12B
augugccaccaacaacuaguaaucagcugguuuucauuaguauuucuagcaucaccacuaguagcaauaugggaacuaaaaaaagacguauacguaguagaacucgacugguacccagacgcaccaggagaaaugguaguacuaacaugcgacacaccagaagaagacggaauaacauggacacuagaucaaucaucagaaguacuaggaucagguaaaacacuaacaauccaaguaaaagaauucggagacgcuggacaauacacaugucacaaaggaggagaaguacuaagccacucacuauuauuacuacacaaaaaagaagacggcauauggucaacagacauacuaaaagaccaaaaagaaccaaaaaacaaaacauuucucagaugcgaagcaaaaaauuacucaggaagauucacaugcuggugguuaacaacaauaucaacagaucuaacauuuucaguaaaaucaucaagaggaucaucagacccacaaggaguaacaugcggagcagcaacacucagcgcagaaagaguaagaggagauaauaaagaauacgaauacucaguggaaugccaagaagauagugcaugcccagcagccgaagaaucauuaccaauugaagucauggucgacgcuguacauaaauuaaaauacgaaaauuacacaaguucauucuuuauaagagacauaauaaaaccagauccaccaaaaaaucuacaacuaaaaccauuaaaaaauaguagacaaguagaaguaagcugggaauauccagacacauggucaacaccacacaguuauuucucauuaacauucuguguacaaguacaaggaaaaaguaaaagagaaaaaaaagauagaguuuucacagacaaaacauccgcaacaguuauauguagaaaaaacgcaucaauaucaguaagagcccaagacagauacuacucaucaaguuggucagaaugggcaucgguaccaugcagcuaa

SEQ ID NO: 627 - RNA, 984 nt, Artificial Sequence
  IL12B(1-328)
augugccaccaacaacuaguuauuuccugguucucauuaguauuccuagccucaccauuaguagcuauaugggaauuaaaaaaagauguauacguaguagaacuagacugguacccagaugcaccaggagaaaugguaguacuaaccugcgacacaccagaagaagacggaauaacauggacccuagaccaaucaucagaaguauuaggaaguggaaaaacacuaacaauacaaguaaaagaauucggagacgcaggacaauauacuugccacaaaggaggagaaguauuaagucauucauuacuccuauuacacaaaaaagaagacggaauauggagcaccgacauacuaaaagaccaaaaagaaccaaaaaacaaaacauuccuaagaugcgaagcaaaaaacuacucaggaagauuuacaugcugguggcuaacaacaauaucaacagaccuaaccuucuccguuaaaaguucaagaggaaguucagauccacaaggaguaacauguggagcagcaacacuaagcgcagaaagaguaagaggcgacaauaaagaauaugaauacucaguagaaugccaagaagauucagcaugucccgcggccgaagaaucacuaccaauagaaguaaugguagacgcaguacacaaacucaaauaugaaaacuacacaucaucauucuuuauaagagacauaauaaaaccagacccaccaaaaaaucuacaacuaaaaccauuaaaaaacucaagacaaguugaaguaagcugggaauauccagacacauggucaacaccacacucauacuuuucacuaacauuuugcguacaaguacaagguaaaucaaaaagagaaaaaaaagaucgaguauuuacagacaaaacaagugcaacagucauauguagaaaaaacgcaucaauaucagucagagcacaagacagauauuacaguaguucauggucagaaugggcaagcguuccaugcuca

SEQ ID NO: 628 - RNA, 921 nt, Artificial Sequence
  IL12B(23-328)
auaugggaacucaaaaaagauguauacguagucgaacuagacugguacccagacgcaccaggagaaaugguaguacuaacaugugauacaccagaagaagauggaauaacauggacacuagaccaaucaucagaaguauuaggaucaggaaaaacacuaacaauacaaguaaaagaauuuggagaugcaggacaauauacaugccacaaaggaggagaaguacuaucgcacagcuuauuacuacuacacaaaaaagaagacggaauauggagcacagacauauuaaaagaccaaaaagaaccaaaaaacaaaacauucuuacgaugcgaagcaaaaaacuauucaggaagauucacaugcugguggcuaacaacaaucagcacagaccuaacauuuucaguaaaaucaagcagaggaucaucagauccacaaggagucacauguggagcagcaacacuuucagccgaaagaguuagaggagauaauaaagaauacgaauacucaguagaaugccaagaagacagcgcauguccagcagcagaagaaagccuaccaauagaaguaaugguagacgcaguucacaaauuaaaauacgaaaauuacacaucaucauucuucauaagagacauaauaaaaccagacccaccaaaaaaccuacaauuaaaaccacuaaaaaacagcagacaaguagaaguaucaugggaauauccagacacauggucaacaccucacagcuacuuuucacuaacauucugcguacaaguacaaggaaaaucaaaaagagaaaaaaaagacagaguauucacagacaaaacaagcgcaacaguaauaugcagaaaaaacgccagcauaucaguuagagcacaagacagauauuacagcucaagcuggucagaaugggcaucaguccccugcucauaa

SEQ ID NO: 629 - RNA, 54 nt, Artificial Sequence; identical to SEQ ID NO: 97
  Linker-sFvCC49-218

SEQ ID NO: 630 - RNA, 1632 nt, Artificial Sequence
  IL12
augugccaucaacaacuaguaauauccugguucuccuuaguguucuuagcaucuccacuaguagcaauaugggaauuaaaaaaagacguauacguaguagaauuagacugguauccugacgcaccaggugaaaugguuguauuaacaugcgauacuccagaagaagacggaauaacauggacacucgaccaaucaucagaaguacuagguucaggaaaaacacuaacuauucaaguaaaagaauucggagaugcaggccaauacacgugucauaaaggaggcgaaguacucagccauucacuauuauuacuucacaaaaaagaagacggaauauggaguacagacauauuaaaagaucaaaaagaaccaaaaaauaaaacauuuuugagaugcgaagcaaaaaauuauucaggaagauuuacauguugguggcuaaccaccauaucaacagaucuaacauucuccguaaaaucaucaagaggaucaucggacccucaaggaguaacaugcggagcagcaacacuaucagcagaaagaguaagaggagauaauaaagaauacgaauauucaguagaaugccaagaggacagcgcuugccccgccgcagaagaaagcuuaccuauagaaguuaugguagacgcaguacauaaguuaaaauaugagaauuacacaucauccuuuuucauaagagauauuauaaaaccugauccacccaagaaccuacaauuaaaaccacuaaaaaauagucgacagguugaaguuucaugggaauacccagacacauggagcacaccacacucauacuucucacuaacauucuguguacaaguacaaggaaaaucgaaacgcgaaaaaaaagacagaguauuuacagacaaaacaagugcaacagugauaugucgaaaaaacgcaucaauuucaguaagagcacaagacagauauuacucaucaagcuggucagaaugggcaucuguacccugcagcggaaguacaucaggaucagguaaaccuggaucuggagaaggaucaacuaaaggaagaaauuuacccguggcaacaccagacccaggaauguuccccugucuacaccacucgcaaaaucuacuaagagcagugucaaacaugcuacaaaaagcaagacaaacacuagaauuuuauccauguacuucagaagaaauagaccaugaagacauuaccaaagacaaaacaucaacagucgaagcauguuuaccauuagaauuaacaaaaaaugaaucauguuuaaauagucgugaaacuucauuuauaacaaacggcucaugccuagcaucaagaaaaacaaguuucaugauggcacuaugccucucaucaauauaugaagaucuaaaaauguaucagguagaauuuaaaacuaugaacgcgaaauuacuaauggauccaaaaagacaaaucuuccuagaccaaaacauguuagcaguaauagacgaacuaaugcaagcacuaaacuucaauagcgaaaccguaccacaaaaaucaucccuagaagaaccugacuucuacaaaacuaaaauaaaauuauguauauuacuccaugcauucagaauaagagcaguaacaauagacagaguaauguccuaccuaaaugcuucuuaa

SEQ ID NO: 631 - RNA, 786 nt, Artificial Sequence
  CD40LG
augauagaaacauacaaucaaacaagucccagauccgcagcaacaggucuaccaauaucaaugaaaauauuuauguauuuacuaacaguauuccuuauaacacaaaugauaggauccgcacuauucgcaguauaccuacacagaagauuagacaaaauagaagacgaaagaaaccuacacgaagacuucguauucaugaaaacaauacaaagaugcaauacaggagaaagaucauuaucacuacuaaacugcgaagaaauaaaaagccaauuugaaggguuugucaaagacauaaugcuaaacaaagaagaaaccaaaaaagaaaacucauucgaaaugcaaaaaggagaucaaaacccacaaauagcagcacacguaauaucagaagcaucaucaaaaacaacaucaguacuacaaugggccgaaaaaggauacuacacaaugucaaacaaccuaguaacacuagaaaacggaaaacaauuaacaguaaaaagacaaggacuauacuacaucuaugcccaaguaaccuucugcuccaacagagaagcaucaucacaagcaccauucaucgcaucacuaugccuaaaaucaccaggaagauucgaaagaauauuacuaagagcagcaaacacacacucaucagccaaaccaugcggacaacaaucaauacaccuaggaggagucuucgaacuacaaccaggagcaucaguauucguaaacguaacagauccaucacaaguaucacacggaacaggauucacaucauuuggacuacuaaaacucuaa

SEQ ID NO: 632 - RNA, 1632 nt, Artificial Sequence; identical to SEQ ID NO: 32
  IL12(IL12B-Linker-IL12A)

SEQ ID NO: 633 - RNA, 1632 nt, Artificial Sequence; identical to SEQ ID NO: 43
  IL12(IL12B-Linker-IL12A)

SEQ ID NO: 634 - RNA, 1632 nt, Artificial Sequence; identical to SEQ ID NO: 54
  IL12(IL12B-Linker-IL12A)

SEQ ID NO: 635 - RNA, 1632 nt, Artificial Sequence; identical to SEQ ID NO: 76
  IL12(IL12B-Linker-IL12A)

SEQ ID NO: 636 - RNA, 1632 nt, Artificial Sequence; identical to SEQ ID NO: 87
  IL12(IL12B-Linker-IL12A)

SEQ ID NO: 637 - RNA, 1632 nt, Artificial Sequence; identical to SEQ ID NO: 98
  IL12(IL12B-Linker-IL12A)

SEQ ID NO: 638 - RNA, 1632 nt, Artificial Sequence; identical to SEQ ID NO: 109
  IL12(IL12B-Linker-IL12A)

SEQ ID NO: 639 - RNA, 1632 nt, Artificial Sequence; identical to SEQ ID NO: 120
  IL12(IL12B-Linker-IL12A)

SEQ ID NO: 640 - RNA, 1632 nt, Artificial Sequence; identical to SEQ ID NO: 131
  IL12(IL12B-Linker-IL12A)

SEQ ID NO: 641 - RNA, 1632 nt, Artificial Sequence; identical to SEQ ID NO: 142
  IL12(IL12B-Linker-IL12A)

SEQ ID NO: 642 - RNA, 1632 nt, Artificial Sequence
  IL12(IL12B-Linker-IL12A)
augugccaccaacaacucgucaucagcugguucagccucgucuuccucgccuccccccuaguagccauaugggaacuaaaaaaagacguauacguuguagaacuagacugguaccccgacgcacccggcgaaauggucguccucaccugcgacacccccgaagaagauggcauaacauggacccucgaccaauccucagaaguccucggcuccggcaaaacccucacaauccaagucaaagaauucggcgacgccggccaauacaccugccacaaaggcggcgaaguccucucucacucucuccuccuccuccacaaaaaagaagacggcaucugguccaccgacauacucaaagaccaaaaagaacccaaaaacaaaaccuuccugcgaugcgaagccaaaaacuacuccggccgauucacaugcugguggcucaccaccaucucaaccgaccucaccuucuccgucaaauccucccguggcagcuccgacccccaaggagucaccugcggcgcagccacccucuccgccgaacgcgucagaggcgacaacaaagaauacgaauacuccgucgaaugccaagaggacuccgccugccccgccgccgaagaaucacuccccaucgaagucaugguagacgccguacacaaacuaaaauacgaaaacuacaccucuucauucuucauccgagacaucaucaaacccgacccccccaaaaaccuccaacucaaaccccucaaaaacucccgacaagucgaagucagcugggaauacccagacaccugguccaccccacacuccuacuucucacuaaccuucugcguccaaguccaaggcaaaucgaaacgcgaaaaaaaagacagagucuucaccgacaaaaccucagccaccgucaucugccgaaaaaacgcaucaaucagcguccgcgcccaagaccgcuacuacuccuccagcuggagcgaaugggcauccguccccugcuccgggaguacgagugggagugggaagccggggaguggggaggggaguacgaaggggcgcaaccuccccgucgccacccccgaccccggcauguuccccugccuccaccacucccaaaaucuccuccgcgccgucuccaacaugcuccaaaaagcccgccaaacccucgaauucuaccccugcacguccgaagaaaucgaccacgaagacaucaccaaagacaaaaccuccaccgucgaagccugccucccccucgaacucaccaaaaacgaauccugccucaacucacgcgaaaccuccuucaucaccaacggcucaugccucgccucacgaaaaaccuccuucaugauggcccucugccucuccucaaucuacgaagaccucaaaauguaccaagucgaauucaaaaccaugaacgccaaacuccucauggaccccaaacgccaaaucuuccucgaccaaaacaugcucgcagucaucgacgaacucaugcaagcccucaacuucaacuccgaaaccgucccccaaaaaucaucccucgaagaaccagacuucuacaaaaccaaaaucaaacucugcauccuccuccacgccuuccgcauccgcgccguaaccaucgaccgcgucaugucauaccucaacgccuccuaa

SEQ ID NO: 643 - RNA, 1632 nt, Artificial Sequence
  IL12(IL12B-Linker-IL12A)
augugccaucaacaacuaguaauaucaugguucucacuaguauucuuagcaaguccccuaguagcaauaugggaacuaaaaaaagacgucuacguuguagaauuagacugguacccagacgcaccaggcgaaaugguaguacuaacaugcgauacaccagaagaagacggaauaacauggacacuagaccaaucaucagaaguucuaggaucaggaaaaacauuaacaauacaaguaaaagaauucggggacgcaggacaauauacaugccacaaaggaggagaaguuuuaucacacucacuacuauuauuacacaaaaaagaagacggaauauggucaacugacauacuaaaagaucaaaaagaaccaaaaaacaaaacauucuuaagaugugaagcaaaaaauuacaguggaagauucacaugcugguggcuaacaacaauaaguacagaccuaacauuuucaguaaaaucaaguagaggaucaucagacccacaaggcguaacauguggagcagcaacacuaucagcagaacgagucagaggagacaacaaagaauacgaauacuccguagaaugccaagaagacagugcaugccccgcagccgaagaaucauuaccaauagaaguaaugguagacgcaguacacaaacuaaaauacgaaaacuacacaagcucauucuuuauacgagauauaauaaaaccagacccaccaaaaaaccuacaacuaaaaccacuaaaaaacucacgccaaguagaaguauccugggaauacccagauacauggucaacaccacacucauauuucagcuuaacauucuguguacaaguacaaggaaaaucaaaaagagaaaaaaaagauagaguauucaccgacaagacaagcgcaacaguaauuuguagaaaaaacgcaucaauaucaguaagagcacaagacagauacuacagcucaagcuggucagaaugggcaaguguaccauguucaggaaguacaaguggaaguggaaaaccaggaaguggagaaggaaguacaaaaggaagaaaccuaccaguagcaacacccgacccaggaauguucccaugccuacaccacucacaaaaccuacuacgcgcaguaucaaacauguuacaaaaagcacgacaaacacuugaauucuaccccugcacaucagaagaaauagaccacgaagacauaacaaaagacaaaacauccaccguagaagcaugccucccacuagaacuaacaaaaaacgaaucaugccuaaacucaagagaaacaucauucauaacaaacggaucaugccuagcaucacgaaaaacaucauucaugauggcacuaugccuauccuccauauacgaagaccuaaaaauguaccaaguagaauucaaaacaaugaacgcaaaacuacuaauggacccaaaaagacaaauauuccuagaccaaaacaugcucgcaguaauagacgaacuaaugcaagcacuaaacuuuaacucagaaacaguaccccaaaaaucaucacuagaagaaccagacuucuacaaaacaaaaauaaaauuaugcauacuccuacacgcauucagaaucagagcaguaacaauagaccgcguaaugucauaccuaaacgcaucauaa

SEQ ID NO: 644 - RNA, 1632 nt, Artificial Sequence
  IL12(IL12B-Linker-IL12A)
augugccaccaacaacuaguuauuuccugguucucauuaguauuccuagccucaccauuaguagcuauaugggaauuaaaaaaagauguauacguaguagaacuagacugguacccagaugcaccaggagaaaugguaguacuaaccugcgacacaccagaagaagacggaauaacauggacccuagaccaaucaucagaaguauuaggaaguggaaaaacacuaacaauacaaguaaaagaauucggagacgcaggacaauauacuugccacaaaggaggagaaguauuaagucauucauuacuccuauuacacaaaaaagaagacggaauauggagcaccgacauacuaaaagaccaaaaagaaccaaaaaacaaaacauuccuaagaugcgaagcaaaaaacuacucaggaagauuuacaugcugguggcuaacaacaauaucaacagaccuaaccuucuccguuaaaaguucaagaggaaguucagauccacaaggaguaacauguggagcagcaacacuaagcgcagaaagaguaagaggcgacaauaaagaauaugaauacucaguagaaugccaagaagauucagcaugucccgcggccgaagaaucacuaccaauagaaguaaugguagacgcaguacacaaacucaaauaugaaaacuacacaucaucauucuuuauaagagacauaauaaaaccagacccaccaaaaaaucuacaacuaaaaccauuaaaaaacucaagacaaguugaaguaagcugggaauauccagacacauggucaacaccacacucauacuuuucacuaacauuuugcguacaaguacaagguaaaucaaaaagagaaaaaaaagaucgaguauuuacagacaaaacaagugcaacagucauauguagaaaaaacgcaucaauaucagucagagcacaagacagauauuacaguaguucauggucagaaugggcaagcguuccaugcucaggaaguacaaguggaaguggaaaaccaggaaguggagaaggaaguacaaaaggaagaaaccuaccaguagcaacaccagaccccggaauguucccaugccuccaccacucacaaaaccuacuaagagcaguaucaaacauguuacaaaaagccagacaaacauuagaauuuuacccauguacaucagaagaaauagaccacgaagacauaacaaaagacaaaacaucaacaguagaagcaugccuaccauuagaacuaaccaaaaacgaaucaugccuaaacucaagagaaacaucauucauaacaaacggaucaugccuagcaucaagaaaaacaucauucaugauggcacuaugccuaucauccauauacgaagaccuaaaaauguaccaaguagaauuuaaaacaaugaacgcaaaacuccuaauggacccaaaaagacaaauauuccuagaccaaaauaugcucgcaguaauagacgaauuaaugcaagcacuaaacuucaacucagaaacaguaccacaaaaaucaucccuagaagaacccgacuucuacaaaacaaaaauaaaacuaugcauacuacuacacgcauucagaauaagagccguaacaauagacagaguaaugucauaccuaaacgcaucauaa

SEQ ID NO: 645 - protein, 467 aa, Artificial Sequence
  Ipilimumab protein HC with signale peptide
MELGLSWIFLLAILKGVQCQVQLVESGGGVVQPGRSLRLSCAASGFTFSSYTMHWVRQAPGKGLEWVTFISYDGNNKYYADSVKGRFTISRDNSKNTLYLQMNSLRAEDTAIYYCARTGWLGPFDYWGQGTLVTVSSASTKGPSVFPLAPSSKSTSGGTAALGCLVKDYFPEPVTVSWNSGALTSGVHTFPAVLQSSGLYSLSSVVTVPSSSLGTQTYICNVNHKPSNTKVDKRVEPKSCDKTHTCPPCPAPELLGGPSVFLFPPKPKDTLMISRTPEVTCVVVDVSHEDPEVKFNWYVDGVEVHNAKTKPREEQYNSTYRVVSVLTVLHQDWLNGKEYKCKVSNKALPAPIEKTISKAKGQPREPQVYTLPPSRDELTKNQVSLTCLVKGFYPSDIAVEWESNGQPENNYKTTPPVLDSDGSFFLYSKLTVDKSRWQQGNVFSCSVMHEALHNHYTQKSLSLSPGK

SEQ ID NO: 646 - RNA, 1404 nt, Artificial Sequence
  Ipilimumab HC with signale peptide
auggagcugggccucagcuggaucuuccugcuggccauccucaagggggugcagugccaggugcagcuggucgagagcggcgggggcguggugcagcccgggcgcucccuccggcugagcugcgccgccuccggcuucaccuucagcuccuacaccaugcacuggguccgccaggcgccggggaagggccuggagugggugacguucaucagcuacgacggcaacaacaaguacuacgccgacuccgugaaggggcgguucaccaucagccgcgacaacuccaagaacacccucuaccugcagaugaacagccugcgggccgaggacaccgccaucuacuacugcgcccgcacgggcuggcucgggcccuucgacuacuggggccaggggacccuggucaccguguccagcgcguccaccaagggccccagcguguucccccuggccccguccagcaaguccacgagcggcgggaccgccgcccucggcugccuggucaaggacuacuuccccgagcccgugaccguguccuggaacagcggggcgcugaccagcggcguccacacguuccccgccgugcuccaguccagcggccuguacucccugagcuccguggucaccgugccgagcuccagccucgggacccagaccuacaucugcaacgugaaccacaagcccuccaacacgaaggucgacaagcggguggagcccaagagcugcgacaagacccacacgugcccgcccugccccgcccccgagcugcugggcgggcccuccguguuccucuucccgcccaagcccaaggacacccugaugaucagccgcacccccgaggugaccugcgucguggucgacgugucccacgaggacccggaggucaaguucaacugguacguggacggcguggagguccacaacgccaagaccaagccccgggaggagcaguacaacagcaccuaccgcgugguguccguccugacggugcuccaccaggacuggcugaacgggaaggaguacaagugcaaggugagcaacaaggcccugcccgcgcccaucgagaagaccaucuccaaggccaagggccagccgcgggagccccaggucuacacccucccgcccagccgcgacgagcugaccaagaaccaggugucccugacgugccucgugaagggcuucuaccccagcgacaucgccgucgagugggagagcaacgggcagcccgagaacaacuacaagaccacgcccccggugcuggacuccgacggcagcuucuuccuguacuccaagcucaccguggacaagagccgguggcagcaggggaacgucuucuccugcagcgugaugcacgaggcccugcacaaccacuacacccagaagucccugagccucucccccggcaaguga

SEQ ID NO: 647 - RNA, 1404 nt, Artificial Sequence
  Ipilimumab HC with signale peptide
auggagcucggccucuccuggaucuuccuccucgccauccucaagggcguccagugccagguccagcucgucgaguccggcggcggcgucguccagcccggccgcucccuccgccucuccugcgccgccuccggcuucaccuucuccuccuacaccaugcacuggguccgccaggcccccggcaagggccucgagugggucaccuucaucuccuacgacggcaacaacaaguacuacgccgacuccgucaagggccgcuucaccaucucccgcgacaacuccaagaacacccucuaccuccagaugaacucccuccgcgccgaggacaccgccaucuacuacugcgcccgcaccggcuggcucggccccuucgacuacuggggccagggcacccucgucaccgucuccuccgccuccaccaagggccccuccgucuucccccucgcccccuccuccaaguccaccuccggcggcaccgccgcccucggcugccucgucaaggacuacuuccccgagcccgucaccgucuccuggaacuccggcgcccucaccuccggcguccacaccuuccccgccguccuccaguccuccggccucuacucccucuccuccgucgucaccguccccuccuccucccucggcacccagaccuacaucugcaacgucaaccacaagcccuccaacaccaaggucgacaagcgcgucgagcccaaguccugcgacaagacccacaccugcccccccugccccgcccccgagcuccucggcggccccuccgucuuccucuucccccccaagcccaaggacacccucaugaucucccgcacccccgaggucaccugcgucgucgucgacgucucccacgaggaccccgaggucaaguucaacugguacgucgacggcgucgagguccacaacgccaagaccaagccccgcgaggagcaguacaacuccaccuaccgcgucgucuccguccucaccguccuccaccaggacuggcucaacggcaaggaguacaagugcaaggucuccaacaaggcccuccccgcccccaucgagaagaccaucuccaaggccaagggccagccccgcgagccccaggucuacacccucccccccucccgcgacgagcucaccaagaaccaggucucccucaccugccucgucaagggcuucuaccccuccgacaucgccgucgagugggaguccaacggccagcccgagaacaacuacaagaccaccccccccguccucgacuccgacggcuccuucuuccucuacuccaagcucaccgucgacaagucccgcuggcagcagggcaacgucuucuccugcuccgucaugcacgaggcccuccacaaccacuacacccagaagucccucucccucucccccggcaaguga

SEQ ID NO: 648 - RNA, 1404 nt, Artificial Sequence
  Ipilimumab HC with signale peptide
auggagcugggccucagcuggaucuuccuucuggccauuuugaagggggugcagugccaaguccaguuaguugaauccggagguggcgugguacagcccgggagaucucugaggcuaucaugugcugcaaguggauuuaccuucagcuccuacacaaugcacugggugcggcaggccccuggcaaaggucucgagugggucacuuuuauaucuuaugacgggaacaauaaguacuaugcggauucggugaaaggacgcuucacgaucucacgagacaacagcaagaauacccuguaccuucaaaugaacagucugcgugcugaagauacagccauuuauuacugcgcaagaacuggcugguugggcccauuugacuauugggggcagggaacccucguuacaguguccucugccagcaccaaagguccguccgucuucccccuggcuccuucaaguaagagcacuucuggcgggacagcagcccugggaugucucgugaaggauuacuuuccagagcccguaaccguuuccuggaacucaggcgcuuuaacgagcggugugcauacuuucccugccguccugcagaguucugggcuuuacuccuugagcucgguggugaccgucccaucuuccucacugggaacacagacuuauaucugcaauguuaaucacaaacccaguaacaccaagguggacaaaaggguagaaccuaagagcugugauaaaacacauaccugcccaccgugucccgcgccugagcuacucggcggcccauccguguuucuguuucccccuaagccaaaggacacgcuuaugauuucucggacucccgaggucacaugcgugguuguggaugucagccacgaagacccggaggugaaauuuaauugguacguagaugggguugaagugcauaacgcaaagaccaaaccucgcgaggagcaauauaauucaacuuacagagucgugaguguccugacaguguugcaccaggacuggcucaacggaaaggaauauaaauguaagguuuccaauaaagcccugcccgcuccaaucgagaagaccauaagcaaggccaaaggucagccuagggaaccccagguguacacguuaccacccucucgggaugagcugaccaagaaccaaguaucacucacaugccuugucaaaggcuucuauccuagugacaucgcaguggaaugggagagcaaugggcagccagagaacaacuacaagacuaccccgcccguucuggacuccgauggaucuuucuucuuguacucgaaacuaacaguggacaagagccgcuggcagcaaggcaaugucuucuccuguucagugaugcacgaagcucugcauaaccacuauacucagaagagucucucucugagcccugguaaauga

SEQ ID NO: 649 - RNA, 1404 nt, Artificial Sequence
  Ipilimumab HC with signale peptide
auggagcugggccugagcuggaucuuccugcuggccauccugaagggcgugcagugccaggugcagcugguggagagcggcggcggcguggugcagcccggcagaagccugagacugagcugcgccgccagcggcuucaccuucagcagcuacaccaugcacugggugagacaggcccccggcaagggccuggagugggugaccuucaucagcuacgacggcaacaacaaguacuacgccgacagcgugaagggcagauucaccaucagcagagacaacagcaagaacacccuguaccugcagaugaacagccugagagccgaggacaccgccaucuacuacugcgccagaaccggcuggcugggccccuucgacuacuggggccagggcacccuggugaccgugagcagcgccagcaccaagggccccagcguguucccccuggcccccagcagcaagagcaccagcggcggcaccgccgcccugggcugccuggugaaggacuacuuccccgagcccgugaccgugagcuggaacagcggcgcccugaccagcggcgugcacaccuuccccgccgugcugcagagcagcggccuguacagccugagcagcguggugaccgugcccagcagcagccugggcacccagaccuacaucugcaacgugaaccacaagcccagcaacaccaagguggacaagagaguggagcccaagagcugcgacaagacccacaccugcccccccugccccgcccccgagcugcugggcggccccagcguguuccuguucccccccaagcccaaggacacccugaugaucagcagaacccccgaggugaccugcguggugguggacgugagccacgaggaccccgaggugaaguucaacugguacguggacggcguggaggugcacaacgccaagaccaagcccagagaggagcaguacaacagcaccuacagaguggugagcgugcugaccgugcugcaccaggacuggcugaacggcaaggaguacaagugcaaggugagcaacaaggcccugcccgcccccaucgagaagaccaucagcaaggccaagggccagcccagagagccccagguguacacccugccccccagcagagacgagcugaccaagaaccaggugagccugaccugccuggugaagggcuucuaccccagcgacaucgccguggagugggagagcaacggccagcccgagaacaacuacaagaccaccccccccgugcuggacagcgacggcagcuucuuccuguacagcaagcugaccguggacaagagcagauggcagcagggcaacguguucagcugcagcgugaugcacgaggcccugcacaaccacuacacccagaagagccugagccugagccccggcaaguga

SEQ ID NO: 650 - RNA, 1404 nt, Artificial Sequence
  Ipilimumab HC with signale peptide
auggagcugggccucagcuggaucuuccugcuugccauucugaagggggugcagugccaaguccagcucguugaauccggaggcgggguggugcagcccggaagaucucugcggcuuagcugugcugccuccggcuuuaccuucucuagcuacacaaugcacuggguccgccaggcgccugggaaaggacuggagugggugacguuuaucuccuaugacggcaacaauaaguacuaugcugauucuguuaaaggcagauucaccauuagccgggacaacuccaagaauacacucuaccugcaaaugaacagccugcgcgccgaagauaccgccaucuauuacugcgcuagaacaggguggcucggaccguuugacuauuggggccaggggacccuggugacagucucuuccgccagcaccaaaggacccucuguguucccucuugcucccuccagcaagucuacguccggcgggaccgccgcgcugggaugucucguuaaggauuacuuuccugagcccgugacagucagcuggaacuccggcgcccugaccucuggcgugcauacauucccugcugugcuucagagcuccgggcuguacagccucucuuccgucguuaccgugccgagcucuagccugggaacgcagacauauauuugcaaugugaaucacaaacccuccaacaccaaggucgacaaacggguggaaccuaagucuugugauaaaacacauaccugucccccuugccccgccccggagcugcucggcgggccuagcguuuuucuguuucccccuaagcccaaggacacccuuaugaucucccgcacacccgaggugacgugcgucgugguugaugugagccacgaagacccugaggucaaauucaauugguacguggauggagucgaagugcauaacgcuaagaccaaaccgagagaggagcaauauaauucuacauaccggguuguguccguccugaccgugcuccaccaggacuggcugaacggcaaggaauauaaauguaagguuagcaauaaagcccuucccgcgccuaucgagaagacaauuucuaaggccaaagggcagccccgcgaaccucagguguacacccugcccccguccagagaugagcucacgaagaaccaagucagccugacaugccuggugaaaggauucuauccuuccgacaucgcuguggaaugggagucuaauggccagcccgagaacaacuacaagaccaccccucccguucucgacagcgauggcuccuuuuuccuguacucuaaacuuacagucgacaagagccgguggcagcaagggaauguguucuccuguagcgugaugcacgaagcccugcauaaccacuauacccagaagucucucucccugagcccuggaaaauga

SEQ ID NO: 651 - RNA, 1404 nt, Artificial Sequence
  Ipilimumab HC with signale peptide
auggaauuagguuuauccuggaucuuucuccuagcaauacucaaaggaguacaaugccaaguacaauuaguggaauccggaggagguguaguacaaccaggaagaucacuaagacuaucaugcgcagcaucaggauuuacauucucaucauacacaaugcacuggguaagacaagccccaggaaaaggauuagaauggguuacauuuauauccuacgacggaaacaauaaauacuacgcagacucagucaaaggaagauucacuauaucaagagacaauucuaaaaacacacuauaccuacaaaugaacucucuccgagcagaagauacagccauauacuacugcgcaagaacaggaugguuaggaccuuucgacuacuggggacaaggaacucuaguaacugucucaucugccucaacaaaaggcccaucaguauuuccacuagccccaucaucuaaaucuacaucagguggaaccgcugcauuaggaugcuuaguaaaagacuauuuucccgaaccaguaacuguaucuuggaacuccggagcacuuacuucugguguacacacauucccagcaguuuuacaaagcucaggacuauacucucuaagcucaguaguaacugucccaucaucaucccuuggcacccaaacauacauauguaacguaaaucacaaacccaguaauaccaaaguagacaaaagaguagaacccaaaucaugugauaaaacacacacaugcccccccugcccagcaccugaacuucuaggaggaccaucuguauuccucuucccuccaaaaccaaaagauacucucaugauaucacgcacacccgaaguaacuugugucguaguagacguaucacacgaagacccagaaguuaaauucaacugguauguagacggaguagaaguccacaacgcaaaaacaaaaccacgagaagaacaauacaacuccaccuaucgcguaguuucaguacuuacaguucuccaccaagauuggcuaaacggaaaagaauacaaaugcaaaguaucaaauaaagcuuuaccugcaccaauagaaaaaacaauaaguaaagcaaaaggucaaccacgagaaccccaaguauauacacuuccaccaucaagagacgaacuuaccaaaaaccaagucucacucacaugcuuaguaaaaggauuuuacccaucagauauagcaguagaaugggaauccaauggacaaccagaaaauaauuacaaaaccacaccaccuguacuagauucagacggcucuuucuuucuauacucuaaacuaacaguugauaaaucacgauggcaacaaggcaauguauucucuuguucugucaugcaugaagcacuacacaaccacuacacacaaaaaucacuaucacuaucccccggcaaauga

SEQ ID NO: 652 - RNA, 1404 nt, Artificial Sequence
  Ipilimumab HC with signale peptide
auggagcugggccucagcuggaucuuccuguuggccauucugaagggggugcagugccaaguccagcucguggaauccgguggcgggguagugcagcccggcaggagucugcgguugagcugugcagccuccgguuuuaccuucaguagcuacacuaugcacuggguccgccaggcgccagggaaaggccuggagugggugaccuuuaucuccuaugacggcaacaauaaguacuaugccgauagcgugaaagggagguucacgauuucccgggacaacaguaagaauacucucuaccugcaaaugaacagccugcgcgcagaagauaccgccaucuauuacugcgcaaggaccgguuggcucggcccguuugacuauugggggcagggcacucuggucaccguguccagcgccaguacgaaaggucccuccguauucccauuggcgcccagcuccaagaguacuagcgggggcaccgccgcacugggcugucucgugaaggauuacuuuccagagcccgucacuguguccuggaauagcggggcccugaccaguggugugcauaccuucccagccguccugcaguccagcggcuuguacagucucuccagcgugguaacggugccgagcuccagucuggggacucagaccuauauuugcaacgucaaucacaaacccagcaacacuaagguggacaaacggguggaaccaaaguccugugauaaaacccauaccugucccccaugccccgcaccggagcugcucggcggucccagcgucuuucuguucccacccaagccaaaagacacuuugaugaucagucgcacgcccgaggugaccugcguaguggucgaugugucccacgaagacccagaggucaaguuuaauugguacguggauggcguggaaguacauaacgccaagacuaaaccgagggaggagcaauauaauagcaccuaccggguggucuccgugcugaccguccuccaccaggacuggcugaacgggaaggaauauaaauguaaggugaguaauaaagcgcugcccgccccaaucgagaagacuauuagcaaggcaaaaggccagccccgcgaaccacagguguacacguugcccccguccagggaugagcucaccaagaaccaaguaagccugacuugccuggugaaaggguucuauccaagugacaucgccgucgaaugggaguccaauggucagcccgagaacaacuacaagaccacucccccagugcucgacagcgauggcuccuucuuucuguacaguaaauugaccgucgacaagagccgguggcagcaagggaauguguucuccugcagcgugaugcacgaagcacugcauaaccacuauacgcagaagagucucucccugagccccggcaaauga

SEQ ID NO: 653 - RNA, 1404 nt, Artificial Sequence
  Ipilimumab HC with signale peptide
auggaacucggccuaagcuggaucuuccuccuggccauccucaaaggcguacagugccagguccaacucguagaauccggaggcggcgucguacaacccggccgcucccuccgccuauccugcgcagcuuccggcuucacauucaguucauacaccaugcacuggguccgacaagcccccggcaaaggacucgaaugggucacuuuuaucucuuacgacggcaacaauaaauacuacgcagacuccgucaaaggccgcuuuacaaucucacgugacaacuccaaaaacacccuauaccuccaaaugaacucccuacgcgcugaagacaccgccauuuacuauugcgcccgcacaggcuggcuuggaccauucgacuacuggggacaaggaacccuugucaccgucuccucugccagcaccaaaggccccuccgucuucccccucgcucccagcuccaaauccacgucaggcggcacugcagcccucggaugccuagucaaagacuacuuccccgaacccgucacagucucauggaacuccggagcccucacuucaggcguccacaccuuccccgcaguacuacaaucuucaggccuauacucccuaagcuccgucgucaccguacccuccucaucccucggaacacaaaccuacauaugcaacgucaaccacaaacccucaaacacaaaaguagacaaacgcgucgaacccaaauccugcgacaaaacccauaccugcccacccugccccgccccggaacuccuaggcggccccagcgucuucuuauucccacccaaacccaaagacacgcucaugauaaguagaacccccgaagugaccugcgucgucgucgacgucucccacgaagacccugaaguuaaauucaacugguacgucgacggcgucgaaguucacaacgccaaaaccaaaccccgagaagaacaauacaacuccaccuaccgagucgucucaguacuaacaguccuccaccaagacuggcucaacggaaaagaauacaaaugcaaagucuccaacaaagcacuaccugccccaaucgagaaaacaaucuccaaagccaaaggacaaccccgugaaccccagguauacacccuacccccaucacgcgacgaacucaccaaaaaucaggucagccuaaccugccucgucaaaggauucuaccccuccgacaucgccgucgaaugggaaagcaacggccaacccgaaaacaacuacaaaaccaccccacccguacucgacuccgacggcuccuucuuccucuacuccaagcucaccgucgacaaaucccgcuggcaacagggaaacguauucuccugcuccgucaugcacgaagcccuccacaaccacuauacccaaaaaucacucucccuaucacccggaaaauaa

SEQ ID NO: 654 - RNA, 1404 nt, Artificial Sequence
  Ipilimumab HC with signale peptide
auggaacuaggccuaucauggaucuuccuccucgccauccucaaaggcguccaaugccagguccaacucgucgaauccggcggaggcgucguccaacccggccgaucacuccgccucuccugcgccgccuccggcuucacuuucuccuccuacacaaugcacuggguacgccaagccccaggaaaaggacucgaaugggucaccuucaucuccuacgacggaaacaacaaauacuacgccgacagcguuaaaggacgauucacaaucucccgcgacaacucuaaaaacacccuauaccuccaaaugaacucccuccgcgccgaagacacagcaaucuacuacugcgccagaaccggauggcuaggccccuucgacuacuggggccaaggaacccucgucacaguauccuccgccuccaccaaaggcccuuccguauuuccccuggcccccucauccaaauccaccagcggcggaaccgccgcacuuggcugccucguaaaagacuacuuccccgaacccguaaccgucuccuggaacagcggcgcccuaacgucaggcguacacaccuuccccgcaguccuccaauccuccggacuauauagccucuccagcguaguaacaguacccuccagcucucucggcacacaaaccuauaucugcaacguaaaccacaaacccagcaacaccaaaguugacaaacgcguugaacccaaauccugcgacaaaacccacacaugcccacccugccccgcccccgaacuccucggcggucccucagucuuccucuucccaccaaaaccuaaagacacucuaaugauaucccgcaccccagaagugaccugcgucguagucgacgucucccacgaagaccccgaagucaaauucaacugguacgucgacggcgucgaaguacacaacgccaaaaccaaaccccgagaagaacaauacaacucaaccuacagagucgucagcguccucaccguccuccaucaggacuggcucaacggaaaagaauacaaaugcaaagucuccaacaaagcccuaccagcacccauagagaaaaccaucuccaaagccaagggccaaccacgcgaaccccaaguauacacacucccacccucacgagacgaacucaccaagaaccaaguaucuuuaaccugccuugucaaaggcuucuaccccuccgacaucgccguggaaugggaauccaacggacaacccgaaaacaacuacaagaccacaccacccguccuugacucagacggcuccuucuuccucuauuccaaacuuaccgucgacaaaucccgauggcaacaaggcaacgucuucuccugcucaguaaugcacgaagcccuacacaaccacuacacgcaaaaaucacucucccugucccccggaaaauga

SEQ ID NO: 655 - RNA, 1404 nt, Artificial Sequence
  Ipilimumab HC with signale peptide
auggaacuuggccuuuccuggaucuuccuccucgccauacucaaaggcguccaaugccaaguucagcuagucgaauccgguggcggcguaguccaacccggacgcagccuccgacuauccugcgccgccuccggauucaccuucuccucauacaccaugcacuggguccgccaagcccccggcaaaggccucgaaugggucacauucaucuccuacgauggaaacaacaaauacuacgccgacucagucaaaggccgcuucacaaucucccgagacaacuccaaaaacacccuauaccuccaaaugaacucacuuagagccgaagacacagcaauauacuacugcgcccgcaccggauggcuaggacccuucgacuacuggggccaagggacccucgucaccguuagcuccgccuccacaaaaggacccuccguauucccccucgccccauccuccaaauccacaucuggcggcaccgccgcacucggaugccucguaaaagacuacuuccccgaacccgucacagucagcuggaacucaggcgcucucaccuccggcguccacacauucccggcaguccugcaaagcagcggccucuacucccuaucaucuguagucaccgucccauccucuucccucggcacccaaaccuacaucugcaacguaaaccacaaacccagcaacaccaaaguggauaaacgaguagaacccaaaucuugcgacaaaacccacacuugcccacccugccccgccccagaacuucuaggcggacccuccgucuuccucuucccacccaaacccaaagacacccucaugaucucacgcacccccgagguaaccugcguugucgucgacgugucccacgaagacccugaagucaaguucaacugguacgucgacggcgucgaagugcacaacgccaaaacaaaaccacgcgaagaacaauauaacucaaccuaccgcguagucuccguccuaaccguccuccaccaagacuggcuaaacggcaaagaauacaaauguaaaguauccaauaaagcacuccccgcccccauagagaaaacgaucuccaaggccaaaggucaaccacgcgaaccccaaguauacacccuaccaccaucccgcgacgaacucaccaaaaaccaaguaucccuaaccugccuagucaaaggcuucuaccccuccgacaucgcaguagaaugggaauccaacggccaaccagaaaacaacuacaagacaacaccucccguccucgacuccgacggauccuucuucuuauacucaaaacuaaccgucgacaaaucuagauggcaacaaggcaacgucuucucaugcuccguaaugcacgaagcucuccacaaccacuacacccaaaaaucacucucccucucccccggcaaauga

SEQ ID NO: 656 - RNA, 1404 nt, Artificial Sequence
  Ipilimumab HC with signale peptide
auggaacuaggacucucauggauauuuuuacuagccauacucaaaggcguccaaugucaaguacaacuaguagaaucaggcggaggaguuguccaacccggccgaucccuccgcuuaucaugugcagcaucuggauucacauuuucaucauacacaaugcacugggucagacaagccccaggaaaagguuuagaauggguaacauuuauaucauacgacgguaacaacaaauacuaugcagacucaguaaaaggaagauuuacaaucagcagagacaauagcaaaaacacacuauaccuacaaaugaacucccuacgagcagaagacacagccaucuauuacugugcacgaacaggauggcuaggaccauucgauuacuggggccaaggaacauuagucaccguaucuucugcauccacaaaagguccuucaguauuuccauuagcacccagcuccaaaucuacaucuggcggaacagccgccuuaggaugcuuaguuaaagauuacuuuccagaaccaguaacaguuucauggaacucaggagcucuaacaucuggaguacacacauuuccagcaguccuacaaucauccggacuauauucacuaucaucaguaguaacuguccccucaucaucauuaggcacacaaacuuauauuugcaauguaaaccauaaaccaucaaauacaaaagucgacaaaagaguagaaccaaaaucaugcgacaaaacccacacauguccacccugccccgccccagaauuauuaggaggaccaucugucuuccuuuucccaccaaaaccaaaagacaccuuaaugauaucucgaacuccagaaguaacauguguaguuguagauguuucacaugaagacccagaaguaaaauucaacugguacgucgacggaguagaaguacacaaugcaaaaacaaaaccccgagaagaacaauacaacuccacauacagaguagucucaguacuaacaguacuccaucaagacuggcuaaacggaaaagaauacaaauguaaaguaaguaauaaagcacuacccgcaccaauagaaaaaacaauaucaaaagcaaaaggacaaccaagagaaccacaaguauauacacuaccuccauccagagaugaauuaacaaaaaaccaaguaagucuaacauguuuaguaaaaggauucuaucccagcgacauagcagucgaaugggaaucaaauggacaaccagaaaacaacuauaaaaccacaccaccaguauuagauucagacggaucauuuuuccuuuacucaaaauuaacaguagacaaauccagauggcaacaaggcaaugucuuuucaugcucugucaugcacgaagcucuacauaaucacuacacucaaaaaucacuaucacucucaccaggcaaauga

SEQ ID NO: 657 - RNA, 1404 nt, Artificial Sequence
  Ipilimumab HC with signale peptide
auggaacuaggacuauccuggauauuucuacuagccauccuaaaaggaguacaaugucaaguacaauuaguagaauccggaggcggaguaguccaacccggaagaucacuaagacucaguugugcagcaucaggauucacauuuucaucauauacaaugcacuggguuagacaagcacccggaaaaggacucgaauggguaaccuuuaucuccuacgauggaaacaauaaauauuacgcagauucuguaaaaggccgauucacaauaucaagagacaacucuaaaaauacauuauaccuacaaaugaacucuuuaagagcagaagacacagcaauauauuacugugcaagaacaggauggcucggaccauucgacuauuggggacaaggaaccuuaguaacaguauccagcgcuagcacaaaaggcccuucugucuucccauuagcaccauccucaaaaucaacuucuggcggaacagcagcucuaggaugcuuaguaaaagauuauuuuccagaaccaguuacuguauccuggaacucaggagcacuaaccaguggaguucacacauuuccagccguauuacaaucauccggauuauauucauuaucauccgucguaaccguaccaagcucaucauuaggaacacaaacauacauaugcaacguaaaucacaaaccauccaauacaaaaguagauaaaagaguagaaccuaaauccugugauaaaacacacacaugcccaccaugcccagcaccagaauuacuaggaggaccaucaguauuccuauucccaccaaaaccaaaagauacacuaaugauaucaagaacaccagaaguaacuuguguagucguagacgucucacaugaagacccagaaguaaaauuuaauugguauguugacggagucgaaguacacaacgccaaaacaaaaccacgagaagaacaauacaacucaacauauagaguaguaucuguauuaacaguauuacaucaagauugguuaaacggaaaagaauacaaauguaaaguaucaaauaaagcucuaccagcaccaauagaaaagacaaucucaaaagcaaaaggccaaccucgagaaccacaaguauacacacuaccaccaucaagagacgaauuaaccaaaaaccaagucucauuaacaugcuuaguuaaagguuucuaccccagcgacaucgcaguugaaugggaaucaaacggucaaccugaaaacaacuauaaaacaacaccaccaguuuuagacucagauggauccuuuuucuuauacucaaaauuaacaguugacaaaucaagauggcaacaaggaaaugucuuuucauguuccgucaugcaugaagcacuacacaaccauuacacccaaaaaucacucucacuaucacccgguaaauaa

SEQ ID NO: 658 - RNA, 1404 nt, Artificial Sequence
  Ipilimumab backbone Rituximab HC with signale peptide
auggagcugggccucagcuggaucuuccugcuggccauccucaagggggugcagugccaggugcagcuggucgagagcggcgggggcguggugcagcccgggcgcucccuccggcugagcugcgccgccuccggcuucaccuucagcuccuacaccaugcacuggguccgccaggcgccggggaagggccuggagugggugacguucaucagcuacgacggcaacaacaaguacuacgccgacuccgugaaggggcgguucaccaucagccgcgacaacuccaagaacacccucuaccugcagaugaacagccugcgggccgaggacaccgccaucuacuacugcgcccgcacgggcuggcucgggcccuucgacuacuggggccaggggacccuggucaccguguccagcgcguccaccaagggccccagcguguucccccuggccccguccagcaaguccacgagcggcgggaccgccgcccucggcugccuggucaaggacuacuuccccgagcccgugaccguguccuggaacagcggggcgcugaccagcggcguccacacguuccccgccgugcuccaguccagcggccuguacucccugagcuccguggucaccgugccgagcuccagccucgggacccagaccuacaucugcaacgugaaccacaagcccuccaacacgaaggucgacaagcggguggagcccaagagcugcgacaagacccacacgugcccgcccugccccgcccccgagcugcugggcggcccgagcguguuccucuucccgcccaagcccaaggacacccugaugaucagccgcacccccgaggucacgugcgugguggucgacgugagccacgaggaccccgaggugaaguucaacugguacgucgacgggguggaggugcacaacgccaagaccaagccccgggaggagcaguacaacagcaccuaccgcgucgugagcgugcugaccguccuccaccaggacuggcugaacggcaaggaguacaagugcaaggugucgaacaaggcccugccggcccccaucgagaagacgaucagcaaggcgaagggccagccgcgggagccccaggucuacacccucccgcccagccgcgacgagcugaccaagaaccaggugucccugacgugccucgugaagggcuucuaccccagcgacaucgccgucgagugggagagcaacgggcagcccgagaacaacuacaagaccacgcccccggugcuggacuccgacggcagcuucuuccuguacuccaagcucaccguggacaagagccgguggcagcaggggaacgucuucuccugcagcgugaugcacgaggcccugcacaaccacuacacccagaagucccugagccucucccccggcaaguga

SEQ ID NO: 659 - RNA, 1404 nt, Artificial Sequence
  Ipilimumab backbone Rituximab HC with signale peptide
auggagcugggccucagcuggaucuuccuucuggccauuuugaagggggugcagugccaaguccaguuaguugaauccggagguggcgugguacagcccgggagaucucugaggcuaucaugugcugcaaguggauuuaccuucagcuccuacacaaugcacugggugcggcaggccccuggcaaaggucucgagugggucacuuuuauaucuuaugacgggaacaauaaguacuaugcggauucggugaaaggacgcuucacgaucucacgagacaacagcaagaauacccuguaccuucaaaugaacagucugcgugcugaagauacagccauuuauuacugcgcaagaacuggcugguugggcccauuugacuauugggggcagggaacccucguuacaguguccucugccagcaccaaagguccguccgucuucccccuggcuccuucaaguaagagcacuucuggcgggacagcagcccugggaugucucgugaaggauuacuuuccagagcccguaaccguuuccuggaacucaggcgcuuuaacgagcggugugcauacuuucccugccguccugcagaguucugggcuuuacuccuugagcucgguggugaccgucccaucuuccucacugggaacacagacuuauaucugcaauguuaaucacaaacccaguaacaccaagguggacaaaaggguagaaccuaagagcugugauaaaacacauaccugcccaccgugucccgcccccgagcugcugggcggcccgagcguguuccucuucccgcccaagcccaaggacacccugaugaucagccgcacccccgaggucacgugcgugguggucgacgugagccacgaggaccccgaggugaaguucaacugguacgucgacgggguggaggugcacaacgccaagaccaagccccgggaggagcaguacaacagcaccuaccgcgucgugagcgugcugaccguccuccaccaggacuggcugaacggcaaggaguacaagugcaaggugucgaacaaggcccugccggcccccaucgagaagacgaucagcaaggcgaagggucagccuagggaaccccagguguacacguuaccacccucucgggaugagcugaccaagaaccaaguaucacucacaugccuugucaaaggcuucuauccuagugacaucgcaguggaaugggagagcaaugggcagccagagaacaacuacaagacuaccccgcccguucuggacuccgauggaucuuucuucuuguacucgaaacuaacaguggacaagagccgcuggcagcaaggcaaugucuucuccuguucagugaugcacgaagcucugcauaaccacuauacucagaagagucucucucugagcccugguaaauga

SEQ ID NO: 660 - RNA, 1404 nt, Artificial Sequence
  Ipilimumab backbone Rituximab HC with signale peptide
auggagcugggccugagcuggaucuuccugcuggccauccugaagggcgugcagugccaggugcagcugguggagagcggcggcggcguggugcagcccggcagaagccugagacugagcugcgccgccagcggcuucaccuucagcagcuacaccaugcacugggugagacaggcccccggcaagggccuggagugggugaccuucaucagcuacgacggcaacaacaaguacuacgccgacagcgugaagggcagauucaccaucagcagagacaacagcaagaacacccuguaccugcagaugaacagccugagagccgaggacaccgccaucuacuacugcgccagaaccggcuggcugggccccuucgacuacuggggccagggcacccuggugaccgugagcagcgccagcaccaagggccccagcguguucccccuggcccccagcagcaagagcaccagcggcggcaccgccgcccugggcugccuggugaaggacuacuuccccgagcccgugaccgugagcuggaacagcggcgcccugaccagcggcgugcacaccuuccccgccgugcugcagagcagcggccuguacagccugagcagcguggugaccgugcccagcagcagccugggcacccagaccuacaucugcaacgugaaccacaagcccagcaacaccaagguggacaagagaguggagcccaagagcugcgacaagacccacaccugcccccccugccccgcccccgagcugcugggcggcccgagcguguuccucuucccgcccaagcccaaggacacccugaugaucagccgcacccccgaggucacgugcgugguggucgacgugagccacgaggaccccgaggugaaguucaacugguacgucgacgggguggaggugcacaacgccaagaccaagccccgggaggagcaguacaacagcaccuaccgcgucgugagcgugcugaccguccuccaccaggacuggcugaacggcaaggaguacaagugcaaggugucgaacaaggcccugccggcccccaucgagaagacgaucagcaaggcgaagggccagcccagagagccccagguguacacccugccccccagcagagacgagcugaccaagaaccaggugagccugaccugccuggugaagggcuucuaccccagcgacaucgccguggagugggagagcaacggccagcccgagaacaacuacaagaccaccccccccgugcuggacagcgacggcagcuucuuccuguacagcaagcugaccguggacaagagcagauggcagcagggcaacguguucagcugcagcgugaugcacgaggcccugcacaaccacuacacccagaagagccugagccugagccccggcaaguga

SEQ ID NO: 661 - protein, 448 aa, Artificial Sequence
  Ipilimumab protein HC without signale peptide
QVQLVESGGGVVQPGRSLRLSCAASGFTFSSYTMHWVRQAPGKGLEWVTFISYDGNNKYYADSVKGRFTISRDNSKNTLYLQMNSLRAEDTAIYYCARTGWLGPFDYWGQGTLVTVSSASTKGPSVFPLAPSSKSTSGGTAALGCLVKDYFPEPVTVSWNSGALTSGVHTFPAVLQSSGLYSLSSVVTVPSSSLGTQTYICNVNHKPSNTKVDKRVEPKSCDKTHTCPPCPAPELLGGPSVFLFPPKPKDTLMISRTPEVTCVVVDVSHEDPEVKFNWYVDGVEVHNAKTKPREEQYNSTYRVVSVLTVLHQDWLNGKEYKCKVSNKALPAPIEKTISKAKGQPREPQVYTLPPSRDELTKNQVSLTCLVKGFYPSDIAVEWESNGQPENNYKTTPPVLDSDGSFFLYSKLTVDKSRWQQGNVFSCSVMHEALHNHYTQKSLSLSPGK

SEQ ID NO: 662 - RNA, 1347 nt, Artificial Sequence
  Ipilimumab HC without signale peptide
caggugcagcuggucgagagcggcgggggcguggugcagcccgggcgcucccuccggcugagcugcgccgccuccggcuucaccuucagcuccuacaccaugcacuggguccgccaggcgccggggaagggccuggagugggugacguucaucagcuacgacggcaacaacaaguacuacgccgacuccgugaaggggcgguucaccaucagccgcgacaacuccaagaacacccucuaccugcagaugaacagccugcgggccgaggacaccgccaucuacuacugcgcccgcacgggcuggcucgggcccuucgacuacuggggccaggggacccuggucaccguguccagcgcguccaccaagggccccagcguguucccccuggccccguccagcaaguccacgagcggcgggaccgccgcccucggcugccuggucaaggacuacuuccccgagcccgugaccguguccuggaacagcggggcgcugaccagcggcguccacacguuccccgccgugcuccaguccagcggccuguacucccugagcuccguggucaccgugccgagcuccagccucgggacccagaccuacaucugcaacgugaaccacaagcccuccaacacgaaggucgacaagcggguggagcccaagagcugcgacaagacccacacgugcccgcccugccccgcccccgagcugcugggcgggcccuccguguuccucuucccgcccaagcccaaggacacccugaugaucagccgcacccccgaggugaccugcgucguggucgacgugucccacgaggacccggaggucaaguucaacugguacguggacggcguggagguccacaacgccaagaccaagccccgggaggagcaguacaacagcaccuaccgcgugguguccguccugacggugcuccaccaggacuggcugaacgggaaggaguacaagugcaaggugagcaacaaggcccugcccgcgcccaucgagaagaccaucuccaaggccaagggccagccgcgggagccccaggucuacacccucccgcccagccgcgacgagcugaccaagaaccaggugucccugacgugccucgugaagggcuucuaccccagcgacaucgccgucgagugggagagcaacgggcagcccgagaacaacuacaagaccacgcccccggugcuggacuccgacggcagcuucuuccuguacuccaagcucaccguggacaagagccgguggcagcaggggaacgucuucuccugcagcgugaugcacgaggcccugcacaaccacuacacccagaagucccugagccucucccccggcaaguga

SEQ ID NO: 663 - RNA, 1347 nt, Artificial Sequence
  Ipilimumab HC without signale peptide
cagguccagcucgucgaguccggcggcggcgucguccagcccggccgcucccuccgccucuccugcgccgccuccggcuucaccuucuccuccuacaccaugcacuggguccgccaggcccccggcaagggccucgagugggucaccuucaucuccuacgacggcaacaacaaguacuacgccgacuccgucaagggccgcuucaccaucucccgcgacaacuccaagaacacccucuaccuccagaugaacucccuccgcgccgaggacaccgccaucuacuacugcgcccgcaccggcuggcucggccccuucgacuacuggggccagggcacccucgucaccgucuccuccgccuccaccaagggccccuccgucuucccccucgcccccuccuccaaguccaccuccggcggcaccgccgcccucggcugccucgucaaggacuacuuccccgagcccgucaccgucuccuggaacuccggcgcccucaccuccggcguccacaccuuccccgccguccuccaguccuccggccucuacucccucuccuccgucgucaccguccccuccuccucccucggcacccagaccuacaucugcaacgucaaccacaagcccuccaacaccaaggucgacaagcgcgucgagcccaaguccugcgacaagacccacaccugcccccccugccccgcccccgagcuccucggcggccccuccgucuuccucuucccccccaagcccaaggacacccucaugaucucccgcacccccgaggucaccugcgucgucgucgacgucucccacgaggaccccgaggucaaguucaacugguacgucgacggcgucgagguccacaacgccaagaccaagccccgcgaggagcaguacaacuccaccuaccgcgucgucuccguccucaccguccuccaccaggacuggcucaacggcaaggaguacaagugcaaggucuccaacaaggcccuccccgcccccaucgagaagaccaucuccaaggccaagggccagccccgcgagccccaggucuacacccucccccccucccgcgacgagcucaccaagaaccaggucucccucaccugccucgucaagggcuucuaccccuccgacaucgccgucgagugggaguccaacggccagcccgagaacaacuacaagaccaccccccccguccucgacuccgacggcuccuucuuccucuacuccaagcucaccgucgacaagucccgcuggcagcagggcaacgucuucuccugcuccgucaugcacgaggcccuccacaaccacuacacccagaagucccucucccucucccccggcaaguga

SEQ ID NO: 664 - RNA, 1347 nt, Artificial Sequence
  Ipilimumab HC without signale peptide
caggugcaacuggucgagagcggcgggggaguugugcagcccgguagaucccucaggcuuucuugcgccgcuucaggcuucaccuuuaguagcuacacaaugcacuggguacggcaggcaccugggaagggacuggaaugggugacuuucaucuccuaugacggcaacaauaaauacuaugccgauucugucaagggucgcuuuacgauuucgcgagacaacagcaaaaauaccuuguacuuacagaugaacucacugcgugcggaggauacagcuauauauuacugugccagaacuggguggcuaggaccauucgacuauuggggccaaggcacccucgugacaguuaguuccgcaucuaccaaggggccgagcguguuuccccuggccccuuccucaaaaaguacuagcggagguacagcugcacuuggcugccuggucaaggauuacuucccagaacccgugaccguaucuuggaacuccggggccuugacgucaggaguucauacuuuuccugcugugcuccagagcaguggccuguacucucuguccagcgucgugaccgugccaucgucuucccucgguacacagacuuauaucuguaaugucaaucacaagcccucaaacaccaaaguugacaagaggguggagccuaaaaguugcgauaagacacauaccuguccaccgugccccgccccugaauuacuugggggaccaagcguauuccuguuucccccuaaaccaaaggacacguugaugauuucccggacucccgaggugacaugugucgugguugaugugucucacgaggacccggaagucaaguucaauugguacguggauggcguagagguucauaacgcgaaaaccaagccucgcgaagaacaguauaauagcacuuacagaguggucucagugcugacaguccuacaccaagacuggcucaacggcaaagaguauaagugcaaagugaguaauaaggcacugcccgccccaaucgagaaaaccauuuccaaggcuaaggggcagccuagggagccccagguuuacacgcuuccacccagccgggaugaacugaccaaaaaccaggugucuuugacaugucucguaaagggauuuuauccuucagacaucgccgucgagugggaaaguaauggucaaccagagaacaacuacaaaacuaccccgcccgugcuggacagcgauggcuccuucuuuuuauacucuaagcugacaguugacaaaucgcgcuggcagcaggggaauguguucagcugcuccgucaugcacgaggcacuccauaaccacuauacucaaaagucacuuagucugucuccuggaaaguga

SEQ ID NO: 665 - RNA, 1347 nt, Artificial Sequence
  Ipilimumab HC without signale peptide
caggugcagcugguggagagcggcggcggcguggugcagcccggcagaagccugagacugagcugcgccgccagcggcuucaccuucagcagcuacaccaugcacugggugagacaggcccccggcaagggccuggagugggugaccuucaucagcuacgacggcaacaacaaguacuacgccgacagcgugaagggcagauucaccaucagcagagacaacagcaagaacacccuguaccugcagaugaacagccugagagccgaggacaccgccaucuacuacugcgccagaaccggcuggcugggccccuucgacuacuggggccagggcacccuggugaccgugagcagcgccagcaccaagggccccagcguguucccccuggcccccagcagcaagagcaccagcggcggcaccgccgcccugggcugccuggugaaggacuacuuccccgagcccgugaccgugagcuggaacagcggcgcccugaccagcggcgugcacaccuuccccgccgugcugcagagcagcggccuguacagccugagcagcguggugaccgugcccagcagcagccugggcacccagaccuacaucugcaacgugaaccacaagcccagcaacaccaagguggacaagagaguggagcccaagagcugcgacaagacccacaccugcccccccugccccgcccccgagcugcugggcggccccagcguguuccuguucccccccaagcccaaggacacccugaugaucagcagaacccccgaggugaccugcguggugguggacgugagccacgaggaccccgaggugaaguucaacugguacguggacggcguggaggugcacaacgccaagaccaagcccagagaggagcaguacaacagcaccuacagaguggugagcgugcugaccgugcugcaccaggacuggcugaacggcaaggaguacaagugcaaggugagcaacaaggcccugcccgcccccaucgagaagaccaucagcaaggccaagggccagcccagagagccccagguguacacccugccccccagcagagacgagcugaccaagaaccaggugagccugaccugccuggugaagggcuucuaccccagcgacaucgccguggagugggagagcaacggccagcccgagaacaacuacaagaccaccccccccgugcuggacagcgacggcagcuucuuccuguacagcaagcugaccguggacaagagcagauggcagcagggcaacguguucagcugcagcgugaugcacgaggcccugcacaaccacuacacccagaagagccugagccugagccccggcaaguga

SEQ ID NO: 666 - RNA, 1347 nt, Artificial Sequence
  Ipilimumab HC without signale peptide
caggugcaacuggucgagagcggcgggggaguugugcagcccggcagaucccuccggcugucuugcgccgcuagcggguucaccuuuuccucuuacacaaugcacugggugcgccaggccccuggaaagggccuugaaugggucacguucaucagcuaugacgggaacaauaaauacuaugcggauuccgugaagggaagauuuaccauuucucgggacaacagcaaaaauacacuguaccuccagaugaacucccugcgcgcugaggauaccgccaucuauuacugugccagaacaggcuggcuuggcccguucgacuauugggggcaaggaacccugguuacagugagcucugcuuccaccaagggccccagcgucuuuccucucgcccccucuuccaaaagcacgucugggggaaccgcugcccugggcugccuggugaaggauuacuucccugaacccguuacaguguccuggaauagcggggcgcucaccuccggaguccauacauuuccugccgugcugcagucuagcggccuuuacucccugagcucuguggucaccguuccguccagcucucucggcacgcagacauauauuuguaacgugaaucacaagcccagcaacaccaaaguggacaagcgggucgagccuaaauccugcgauaagacacauaccugucccccuugccccgcuccggaacugcuugggggaccuucuguguuccuguuucccccuaaacccaaggacacccucaugaucagccgcacacccgagguuacguguguggucguggauguuucccacgaggacccugaagugaaguucaauugguacgucgauggcguggagguccauaacgccaaaaccaagccgagagaagaacaguauaauagcacauaccgggugguuucugugcugaccguccugcaccaagacuggcucaacgggaaagaguauaagugcaaaguguccaauaaggcucugcccgccccuauugagaaaacaaucagcaaggcgaagggacagccccgcgagccucagguuuacacccuucccccgucuagagaugaacugacgaaaaaccaggugucccucacaugucuggucaagggcuuuuauccuagcgacaucgccguggagugggaauccaaugggcaacccgagaacaacuacaaaaccaccccucccgugcuugacucugauggcagcuucuuucuguacuccaagcucacaguugacaaaucucgguggcagcagggaaaugucuucagcugcuccgugaugcacgaggcucugcauaaccacuauacccaaaagagccugucucucuccccuggcaaguga

SEQ ID NO: 667 - RNA, 1347 nt, Artificial Sequence
  Ipilimumab HC without signale peptide
caaguucaacuaguagaaucaggaggaggagucguccaaccaggcagaucacuaagacuaucaugugcagccucuggcuucacauucucuucuuauacaaugcacuggguaagacaagcaccaggaaaaggacuagaauggguaacauucauaucuuacgacggaaauaacaaauauuacgcugauucuguaaaagguagauucacaauuucuagagacaauaguaaaaauacauuauaccuccaaaugaauagucuuagagcagaagauacagcaauauacuauugugcacgaacaggaugguuaggaccauucgauuacuggggucaaggaacauuaguaacaguaucaucugcaucaacaaaagguccuucaguauucccacucgcaccaucaucaaaauccacaucaggaggaacugcagcccucggaugccuagucaaagacuacuucccagaaccaguaaccguaucuuggaacuccggagcauuaacaucuggaguacauacauucccugcaguacuccaaucaucaggacuauacucacuauccuccguaguaaccgucccuucaucaucucuagguacacaaacuuacauaugcaacguaaaucacaaaccaucuaauacaaaaguagacaaaagagucgaaccaaaaucaugcgacaaaacccacacaugccccccaugcccagcacccgaacuacucggaggaccaucaguauuucuauuuccaccaaaaccaaaagauacacuaaugauaucacgaacaccugaaguaaccuguguugucgucgacguaucgcacgaagacccagaaguaaaauuuaauugguacguagacgguguagaaguucacaaugcaaaaacaaaaccaagagaagaacaauacaacucaacauauagaguaguuucugucuuaaccgucuuacaccaagauugguuaaacgguaaagaauauaaaugcaaaguaucuaauaaagcucuacccgccccaaucgaaaaaacaauaucaaaagccaaaggccaaccucgagaaccacaaguauacacacuacccccuucaagagaugaacuaacaaaaaaccaaguaagccuaacaugccuaguaaaaggcuuuuauccaucagacauagcaguagaaugggaaucuaacggucaaccugaaaauaacuauaaaacaacaccaccaguacuagacucagauggaucauucuuucuauacucaaaauuaacaguagauaaaucaagauggcaacaaggaaacguuuuuucuuguucuguaaugcacgaagcacuacacaaucacuauacccaaaaaucucucagccuaucacccggaaaauga

SEQ ID NO: 668 - RNA, 1347 nt, Artificial Sequence
  Ipilimumab HC without signale peptide
caggugcaacuggucgagagcggcgggggugugguacagcccggcaggucccuccggcugaguugcgccgcaagcggguucaccuuuuccaguuacacuaugcacugggugcgccaggccccaggcaaggguuuggaaugggucaccuucaucagcuaugacgggaacaauaaauacuaugcggauuccgugaagggcagguuuacgauuagccgggacaacuccaaaaauacucuguaccuccagaugaacagucugcgcgccgaggauaccgcaaucuauuacugugccaggaccggcugguuggggccguucgacuauuggggucaaggcacucuggugaccgucagcuccgcaagcacgaaggggcccaguguguuuccacucgcccccuccagcaaauccaccaguggcgguaccgcggcccuggggugccugguaaaggauuacuucccagaacccgugacugucagcuggaacuccggcgcacucaccagcggcgugcauaccuuuccagccgugcugcagaguuccggguuguacagccugaguuccgucgugacgguaccgagcagcucccucgguacucagaccuauauuuguaaugugaaucacaagcccaguaacacuaaagucgacaagcggguggagccaaaaagcugcgauaagacccauaccugucccccaugccccgccccggaacugcugggcgggcccuccguguucuuguuuccacccaaaccaaaggacacucucaugaucagccgcacgcccgaggucaccugugugguaguggaugucagucacgaggacccagaagugaaauucaauugguacgucgauggcguggaggugcauaacgcaaagacuaagccgagggaagaacaguauaauuccaccuaccggguagugagcguccugaccgugcugcaccaagacuggcucaacgguaaagaguauaagugcaaagucuccaauaaggcccugcccgcgccaauugagaaaacuaucaguaaggccaagggccagccccgcgagccacagguguacacguugcccccgagcagggaugaacugaccaaaaaccaggugucccucacuugucugguaaagggguuuuauccaagcgacaucgcaguggagugggaaaguaauggccaacccgagaacaacuacaaaaccacucccccaguccuggacuccgaugggagcuucuucuuguacuccaagcucacuguggacaaaagucgguggcagcaggguaaugucuuuagcugcuccgugaugcacgaggcccugcauaaccacuauacgcaaaagagccugagucucucccccggcaaguga

SEQ ID NO: 669 - RNA, 1347 nt, Artificial Sequence
  Ipilimumab HC without signale peptide
caaguccagcuaguagaauccggcggaggcgucguccaaccaggacgcucgcuaagacucagcugcgccgcaucuggcuucacauucagcucauacacaaugcacugggucagacaagcuccaggcaaaggccucgaaugggucacauucauaucauacgacggcaacaacaaauacuacgccgacuccguaaaaggccgcuucaccaucuccagagacaacuccaaaaacacccuauaccuccaaaugaacucacucagagccgaagacaccgcaaucuacuacugcgcaagaaccggcuggcuuggccccuucgauuacuggggacaaggcacccucgucaccgucucauccgcauccaccaaaggcccauccgucuucccccucgcaccaucauccaaauccaccagcggagguaccgccgcacucggcugccuagucaaagacuacuuccccgaaccugucacagucuccuggaacuccggagcccugacaucgggcguccacacauuccccgccguccuacaaagcuccggccucuacagccucuccucagucgucaccguacccuccuccagccucggaacacaaaccuacaucugcaacguuaaccacaaaccuuccaacaccaaagucgacaaacgagucgaacccaaaucgugcgacaaaacccauaccugcccacccugccccgcccccgaacuccucggcggcccauccgucuuccuauucccacccaaaccaaaggacacacucaugauaucacgaaccccugaagucacgugcgucgucgucgacguuucacacgaagaccccgaagucaaauucaacugguacguagacggagucgaaguccacaacgccaaaaccaaaccccgagaagaacaauacaacucuaccuaccgcgucguauccguccucaccguccuccaccaagacuggcuaaacggcaaagaauacaagugcaaaguuucgaacaaagcccuccccgcacccaucgagaaaaccaucuccaaagccaaaggacaaccccgcgaaccccaaguguacacccucccacccucgcgugacgaacucaccaaaaaucaagucucucuaaccugccucguaaaaggcuucuaccccuccgacauagcaguagaaugggaaucuaacggccagcccgaaaacaacuacaaaacaaccccacccguacucgacuccgacggcucauucuuccucuacucaaaacucaccgucgauaaaucccgcuggcaacaaggcaaugucuucucaugcagcgucaugcacgaagcacuccacaaccacuacacacaaaagagccucucccuaucccccggcaaauga

SEQ ID NO: 670 - RNA, 1347 nt, Artificial Sequence
  Ipilimumab HC without signale peptide
caaguccagcuagucgaaucaggcggaggcgucguccaacccggacggucccuacgacucagcugugcugccagcggcuucaccuucucguccuacacaaugcacuggguccggcaagcacccggcaaaggucucgaaugggucaccuucauauccuaugacggcaacaacaaauacuacgccgacuccgucaaaggccgcuucacaaucucaagagacaacuccaaaaacacccucuaccuccaaaugaacucgcuaagagcagaagacaccgccaucuacuacugcgcccgcaccggauggcucggccccuucgacuacuggggccaaggcacccuagucacaguaucauccgccucuacaaagggaccauccgucuucccccucgccccauccuccaaauccaccucuggaggcaccgccgcacucggaugccucgucaaagacuacuuccccgaacccgucacagucuccuggaacuccggcgcccuaaccuccggaguccacacauucccugcuguccuacaauccucgggccuauacucccucucaucuguagucaccguccccucauccucccuuggaacccaaacguacauaugcaacgucaaccacaaaccuuccaacacaaaagucgacaaacguguagagccaaaguccugugacaaaacacacacaugcccaccaugucccgcgcccgaacuacucggcggacccucagucuuccucuuucccccgaaacccaaagacacccucaugauaucacgcacccccgaaguuaccugcgucgucgucgacgucucccacgaagaccccgaagucaaauucaacugguacgucgacggcguagaaguccacaacgccaaaaccaaaccacgggaagaacaauacaacuccacauaccgcgucgucagcguacucaccguccuacaucaagacuggcuaaacggcaaagaauacaaaugcaaaguauccaacaaagcacucccagcaccaaucgagaaaacaaucucaaaagcaaaaggccaaccccgggaaccacaaguauauacccucccacccagcagagacgaacucaccaaaaaccaaguuucacucacaugccucguaaaaggauucuaccccucugacauugcugucgaaugggaauccaacggacaacccgaaaacaacuacaaaaccaccccgcccguccucgacuccgacggcucauucuuccuauacuccaaacucaccguagacaaaucccgauggcagcaaggcaacgucuucuccugcagcguaaugcacgaagcacuccacaaccacuauacccaaaaaucccucucccugucccccggaaaguaa

SEQ ID NO: 671 - RNA, 1347 nt, Artificial Sequence
  Ipilimumab HC without signale peptide
caaguacaacucgucgaauccggcggcggcguaguccaaccaggcagaucccuacgccucuccugcgccgcauccggauucaccuucuccuccuacaccaugcacuggguacgccaagcccccggcaagggccucgaaugggucacguucaucucuuacgacggcaacaacaaauacuacgccgacuccguaaaaggucguuucaccaucucccgcgacaacagcaaaaacacccuauaccuucaaaugaacucccuccgcgccgaagacaccgccaucuacuacugugcccgcaccgguuggcucggccccuucgacuacuggggucaaggaacccuaguuaccguaucauccgcaucuaccaaaggccccuccguauucccacuagccccaucguccaaaucaacaucaggcggcacagccgcccucggaugccuagucaaagacuacuuccccgaacccgucaccgucucauggaacuccggagcccuaaccucgggaguccacaccuucccagcgguacuacaaucauccggacuuuacucccuaucauccgucgucacaguaccauccucaucccucgggacccaaaccuacauaugcaacgucaaccacaaaccauccaacaccaaagucgacaaaagagucgaaccaaaauccugcgacaaaacccacacaugcccacccugcccagcccccgaacuccucggcggccccuccguauuccucuucccacccaaacccaaggacacccucaugauaucccgcaccccagaaguaaccugcguaguagucgacguuucacacgaagaccccgaagucaaauucaacugguacguagacggcgucgagguccacaacgccaaaaccaaaccucgcgaagaacaauacaacagcacauaccgcgucgucuccguccuaaccguacuacaccaagacuggcuaaacggcaaagaauacaagugcaaagucuccaacaaagcccuccccgcccccaucgagaaaaccauauccaaagccaaaggucaaccccgcgaaccccaaguauacacccuacccccaucccgcgacgagcucaccaaaaaccaaguaucccuaaccugccucgucaaaggcuucuaccccuccgacauagccgucgaaugggaaagcaauggccagcccgaaaacaacuacaaaacaaccccacccguccucgacuccgacggcucuuucuuccucuacucaaaacucacagucgacaaaucacgauggcaacaaggcaacgucuucuccugcagcguaaugcacgaagcccuccacaaccacuacacccaaaaaucacucagccuaagccccggcaaguaa

SEQ ID NO: 672 - RNA, 1347 nt, Artificial Sequence
  Ipilimumab HC without signale peptide
caaguccaacuagucgaaucaggaggaggcguaguacaaccaggaagauccuuaagacuuucaugugcagcaucuggauuuaccuucucaucauacacaaugcacugggucagacaagcccccggaaaaggacuagaauggguaacauuuauaucauaugauggaaauaacaaauauuacgcagauucuguaaaaggaagauucaccaucucaagagauaauucaaaaaacacacuauaccuacaaaugaacucacucagagcugaagacaccgcaauauacuauugcgcaagaacaggaugguuaggaccuuucgauuacuggggacaaggaacacuaguuaccgucuccuccgcaaguaccaaaggaccaucuguauucccauuagcaccaucauccaaaucaacaucaggaggaaccgcagcauuaggaugcuuaguaaaagacuacuuuccugaacccguaacaguaucauggaauuccggagcacuaacaucaggaguacauaccuuuccagcaguacuccaaucaucaggauuauauuccuuaucuucaguaguaacagucccaucaucuucacuagguacacaaaccuacaucugcaauguaaaccacaaaccaucaaauacaaaagucgacaaaagaguugaaccaaaaucaugugacaaaacucacacaugcccaccauguccagccccagaauuacuaggaggaccaucaguauuccuuuucccaccaaaaccaaaagauacucuaaugauaucccguaccccagaaguaacaugcgucguaguagacguaucacacgaagaccccgaaguaaaauucaauugguacgucgacggaguagaaguacacaacgccaaaacaaaaccccgagaagaacaauacaacuccacauaccguguaguaucaguauuaacagucuuacaccaagacuggcuaaacggaaaagaauacaaauguaaaguuuccaacaaagcacucccagccccuaucgaaaaaaccauaucaaaagcaaaaggccaacccagagaaccccaaguuuauacacuaccaccaucaagagacgaauuaacaaaaaaccaaguaucccuaacaugccuaguaaaaggauucuacccuucagacaucgcaguagaaugggaauccaacggacaaccugaaaacaacuauaaaacaacaccaccaguauuagauagcgauggaucuuucuucuuauauucaaaacuuacaguagacaaaucucgauggcaacaaggaaacguauucucaugcuccguaaugcacgaagcgcuacauaaccauuacacacaaaaaucacuaucauuaucaccaggaaaauaa

SEQ ID NO: 673 - RNA, 1347 nt, Artificial Sequence
  Ipilimumab HC without signale peptide
caaguucaauuaguagaaucuggaggaggaguaguccaaccaggacguucacuaagacucucuugugcagcuucaggauuuacguucucaagcuauaccaugcacuggguaagacaagccccaggaaaaggauuagaauggguaacauuuauaucuuacgacggcaauaacaaauauuaugcagacucaguuaaagguagauucacaauaagccgagacaauucaaaaaacacucuauaucuacaaaugaauagccuaagagcagaagauacagcaauauauuacugugcacguacaggaugguuagguccuuucgauuacuggggacaagguacucuaguuacaguaagcagcgcaucuaccaaaggaccaagcguauucccucuugcuccaucaagcaaauccacaucaggcggaacagcugcauuaggaugcuuaguaaaagacuauuucccagaacccguaacgguaucuuggaacagcggcgcauuaacaucaggaguacauacuuuuccugcaguacuacaaagcuccggauuauacucuuuaucaucaguaguaacaguaccauccucaucacuaggaacacaaacauauauauguaacguaaaucauaaaccaucaaacaccaaaguagacaaaagaguagaaccaaaaucaugugauaaaacucacaccuguccuccauguccagcacccgaauuauuaggagguccaaguguauucuuauuuccaccaaaaccuaaagauacccuaaugauaucaagaacaccagaaguaacauguguaguaguagacgucucacacgaagacccagaaguaaaauucaacugguacguagacggaguagaaguacauaacgcuaaaacuaaaccacgagaagaacaauacaauaguacauacagaguagugucaguauuaacaguauuacaccaagacuggcuaaauggaaaagaauacaaauguaaaguaucaaauaaagcacuaccagcaccaaucgaaaaaaccaucuccaaagccaaaggacaaccccgugaaccucaagucuauacccuaccacccucaagagacgaacuuacaaaaaaccaaguaagcuuaacaugucuaguaaaaggauucuauccauccgacauagcaguagaaugggaaucaaauggucaaccagaaaacaacuacaaaacaacaccaccaguucucgauucagauggaucauuuuuucuauauagcaaauuaacuguagacaaaucuagauggcaacaaggaaauguauucucauguucaguaaugcaugaagcacuccacaaucauuacacacaaaaaaguuuaaguuuauccccaggcaaauaa

SEQ ID NO: 674 - RNA, 1347 nt, Artificial Sequence
  Ipilimumab backbone Rituximab HC without signale peptide
caggugcagcuggucgagagcggcgggggcguggugcagcccgggcgcucccuccggcugagcugcgccgccuccggcuucaccuucagcuccuacaccaugcacuggguccgccaggcgccggggaagggccuggagugggugacguucaucagcuacgacggcaacaacaaguacuacgccgacuccgugaaggggcgguucaccaucagccgcgacaacuccaagaacacccucuaccugcagaugaacagccugcgggccgaggacaccgccaucuacuacugcgcccgcacgggcuggcucgggcccuucgacuacuggggccaggggacccuggucaccguguccagcgcguccaccaagggccccagcguguucccccuggccccguccagcaaguccacgagcggcgggaccgccgcccucggcugccuggucaaggacuacuuccccgagcccgugaccguguccuggaacagcggggcgcugaccagcggcguccacacguuccccgccgugcuccaguccagcggccuguacucccugagcuccguggucaccgugccgagcuccagccucgggacccagaccuacaucugcaacgugaaccacaagcccuccaacacgaaggucgacaagcggguggagcccaagagcugcgacaagacccacacgugcccgcccugccccgcccccgagcugcugggcggcccgagcguguuccucuucccgcccaagcccaaggacacccugaugaucagccgcacccccgaggucacgugcgugguggucgacgugagccacgaggaccccgaggugaaguucaacugguacgucgacgggguggaggugcacaacgccaagaccaagccccgggaggagcaguacaacagcaccuaccgcgucgugagcgugcugaccguccuccaccaggacuggcugaacggcaaggaguacaagugcaaggugucgaacaaggcccugccggcccccaucgagaagacgaucagcaaggcgaagggccagccgcgggagccccaggucuacacccucccgcccagccgcgacgagcugaccaagaaccaggugucccugacgugccucgugaagggcuucuaccccagcgacaucgccgucgagugggagagcaacgggcagcccgagaacaacuacaagaccacgcccccggugcuggacuccgacggcagcuucuuccuguacuccaagcucaccguggacaagagccgguggcagcaggggaacgucuucuccugcagcgugaugcacgaggcccugcacaaccacuacacccagaagucccugagccucucccccggcaaguga

SEQ ID NO: 675 - RNA, 1347 nt, Artificial Sequence
  Ipilimumab backbone Rituximab HC without signale peptide
caggugcaacuggucgagagcggcgggggaguugugcagcccgguagaucccucaggcuuucuugcgccgcuucaggcuucaccuuuaguagcuacacaaugcacuggguacggcaggcaccugggaagggacuggaaugggugacuuucaucuccuaugacggcaacaauaaauacuaugccgauucugucaagggucgcuuuacgauuucgcgagacaacagcaaaaauaccuuguacuuacagaugaacucacugcgugcggaggauacagcuauauauuacugugccagaacuggguggcuaggaccauucgacuauuggggccaaggcacccucgugacaguuaguuccgcaucuaccaaggggccgagcguguuuccccuggccccuuccucaaaaaguacuagcggagguacagcugcacuuggcugccuggucaaggauuacuucccagaacccgugaccguaucuuggaacuccggggccuugacgucaggaguucauacuuuuccugcugugcuccagagcaguggccuguacucucuguccagcgucgugaccgugccaucgucuucccucgguacacagacuuauaucuguaaugucaaucacaagcccucaaacaccaaaguugacaagaggguggagccuaaaaguugcgauaagacacauaccuguccaccgugccccgcccccgagcugcugggcggcccgagcguguuccucuucccgcccaagcccaaggacacccugaugaucagccgcacccccgaggucacgugcgugguggucgacgugagccacgaggaccccgaggugaaguucaacugguacgucgacgggguggaggugcacaacgccaagaccaagccccgggaggagcaguacaacagcaccuaccgcgucgugagcgugcugaccguccuccaccaggacuggcugaacggcaaggaguacaagugcaaggugucgaacaaggcccugccggcccccaucgagaagacgaucagcaaggcgaaggggcagccuagggagccccagguuuacacgcuuccacccagccgggaugaacugaccaaaaaccaggugucuuugacaugucucguaaagggauuuuauccuucagacaucgccgucgagugggaaaguaauggucaaccagagaacaacuacaaaacuaccccgcccgugcuggacagcgauggcuccuucuuuuuauacucuaagcugacaguugacaaaucgcgcuggcagcaggggaauguguucagcugcuccgucaugcacgaggcacuccauaaccacuauacucaaaagucacuuagucugucuccuggaaaguga

SEQ ID NO: 676 - RNA, 1347 nt, Artificial Sequence
  Ipilimumab backbone Rituximab HC without signale peptide
caggugcagcugguggagagcggcggcggcguggugcagcccggcagaagccugagacugagcugcgccgccagcggcuucaccuucagcagcuacaccaugcacugggugagacaggcccccggcaagggccuggagugggugaccuucaucagcuacgacggcaacaacaaguacuacgccgacagcgugaagggcagauucaccaucagcagagacaacagcaagaacacccuguaccugcagaugaacagccugagagccgaggacaccgccaucuacuacugcgccagaaccggcuggcugggccccuucgacuacuggggccagggcacccuggugaccgugagcagcgccagcaccaagggccccagcguguucccccuggcccccagcagcaagagcaccagcggcggcaccgccgcccugggcugccuggugaaggacuacuuccccgagcccgugaccgugagcuggaacagcggcgcccugaccagcggcgugcacaccuuccccgccgugcugcagagcagcggccuguacagccugagcagcguggugaccgugcccagcagcagccugggcacccagaccuacaucugcaacgugaaccacaagcccagcaacaccaagguggacaagagaguggagcccaagagcugcgacaagacccacaccugcccccccugccccgcccccgagcugcugggcggcccgagcguguuccucuucccgcccaagcccaaggacacccugaugaucagccgcacccccgaggucacgugcgugguggucgacgugagccacgaggaccccgaggugaaguucaacugguacgucgacgggguggaggugcacaacgccaagaccaagccccgggaggagcaguacaacagcaccuaccgcgucgugagcgugcugaccguccuccaccaggacuggcugaacggcaaggaguacaagugcaaggugucgaacaaggcccugccggcccccaucgagaagacgaucagcaaggcgaagggccagcccagagagccccagguguacacccugccccccagcagagacgagcugaccaagaaccaggugagccugaccugccuggugaagggcuucuaccccagcgacaucgccguggagugggagagcaacggccagcccgagaacaacuacaagaccaccccccccgugcuggacagcgacggcagcuucuuccuguacagcaagcugaccguggacaagagcagauggcagcagggcaacguguucagcugcagcgugaugcacgaggcccugcacaaccacuacacccagaagagccugagccugagccccggcaaguga

SEQ ID NO: 677 - protein, 235 aa, Artificial Sequence
  Ipilimumab protein LC with signale peptide
METPAQLLFLLLLWLPDTTGEIVLTQSPGTLSLSPGERATLSCRASQSVGSSYLAWYQQKPGQAPRLLIYGAFSRATGIPDRFSGSGSGTDFTLTISRLEPEDFAVYYCQQYGSSPWTFGQGTKVEIKRTVAAPSVFIFPPSDEQLKSGTASVVCLLNNFYPREAKVQWKVDNALQSGNSQESVTEQDSKDSTYSLSSTLTLSKADYEKHKVYACEVTHQGLSSPVTKSFNRGEC

SEQ ID NO: 678 - RNA, 708 nt, Artificial Sequence
  Ipilimumab LC with signale peptide
auggagacccccgcccagcugcucuuccugcugcuccuguggcugccggacaccacgggcgagaucgugcugacccagagccccggcacccucucccugagcccgggggagcgcgccacgcuguccugccgggccagccaguccgucggcagcuccuaccucgcgugguaccagcagaagcccgggcaggcgccccgccugcugaucuacggcgccuucagccgggccaccgggauccccgaccgcuucuccggcagcggcuccgggaccgacuucacccucacgaucagccggcuggagccggaggacuucgccguguacuacugccagcaguacggcuccagccccuggaccuucgggcagggcaccaagguggagaucaagcgcaccgucgccgcccccuccguguucaucuucccgcccagcgacgagcagcugaaguccgggacggccagcguggucugccuccugaacaacuucuacccccgggaggccaaggugcaguggaagguggacaacgcgcugcaguccggcaacagccaggagagcgucaccgagcaggacuccaaggacagcaccuacucccucagcuccacccugacgcugagcaaggccgacuacgagaagcacaagguguacgccugcgaggugacccaccagggccucuccagccccgucaccaaguccuucaaccgcggggagugcuga

SEQ ID NO: 679 - RNA, 708 nt, Artificial Sequence
  Ipilimumab LC with signale peptide
auggagacccccgcccagcuccucuuccuccuccuccucuggcuccccgacaccaccggcgagaucguccucacccagucccccggcacccucucccucucccccggcgagcgcgccacccucuccugccgcgccucccaguccgucggcuccuccuaccucgccugguaccagcagaagcccggccaggccccccgccuccucaucuacggcgccuucucccgcgccaccggcauccccgaccgcuucuccggcuccggcuccggcaccgacuucacccucaccaucucccgccucgagcccgaggacuucgccgucuacuacugccagcaguacggcuccucccccuggaccuucggccagggcaccaaggucgagaucaagcgcaccgucgccgcccccuccgucuucaucuucccccccuccgacgagcagcucaaguccggcaccgccuccgucgucugccuccucaacaacuucuacccccgcgaggccaagguccaguggaaggucgacaacgcccuccaguccggcaacucccaggaguccgucaccgagcaggacuccaaggacuccaccuacucccucuccuccacccucacccucuccaaggccgacuacgagaagcacaaggucuacgccugcgaggucacccaccagggccucuccucccccgucaccaaguccuucaaccgcggcgagugcuga

SEQ ID NO: 680 - RNA, 708 nt, Artificial Sequence
  Ipilimumab LC with signale peptide
auggagacccccgcccagcuucucuuccuucuguuguuauggcugccugacacaacuggcgaaaucgugcuaacgcaaagcccagggacccucucccugucuccgggagagagagcuacacuuucaugcagggcaagucagagcgucgguuccucuuaccuggccugguaucagcagaagcccggccaagcgccucgguugcucauuuacggggcuuuuucgcgcgccacuggaauaccagaucgauucucaggcagcgguagugggaccgacuuuacacugaccaucucccgucuggaacccgaggauuucgcaguuuauuacugucagcaguauggaucuagcccuuggacuuuuggccagggcacaaaaguggaaauuaagagaaccguagccgcuccauccguguucaucuuucccccuucagacgagcaacucaaaagugggacggcaagcgucgugugcuuacugaacaauuucuacccaagggaggccaagguucaguggaaaguggauaacgcucugcagucuggaaauucccaggaaucagucacugagcaagacagcaaggauaguaccuauucuuuguccagcacacugacucuaucgaaggccgacuacgaaaaacacaagguguacgcgugugagguaacccaucagggucucucuuccccgguuacaaaaucauuuaaccggggcgagugcuga

SEQ ID NO: 681 - RNA, 708 nt, Artificial Sequence
  Ipilimumab LC with signale peptide
auggagacccccgcccagcugcuguuccugcugcugcuguggcugcccgacaccaccggcgagaucgugcugacccagagccccggcacccugagccugagccccggcgagagagccacccugagcugcagagccagccagagcgugggcagcagcuaccuggccugguaccagcagaagcccggccaggcccccagacugcugaucuacggcgccuucagcagagccaccggcauccccgacagauucagcggcagcggcagcggcaccgacuucacccugaccaucagcagacuggagcccgaggacuucgccguguacuacugccagcaguacggcagcagccccuggaccuucggccagggcaccaagguggagaucaagagaaccguggccgcccccagcguguucaucuucccccccagcgacgagcagcugaagagcggcaccgccagcguggugugccugcugaacaacuucuaccccagagaggccaaggugcaguggaagguggacaacgcccugcagagcggcaacagccaggagagcgugaccgagcaggacagcaaggacagcaccuacagccugagcagcacccugacccugagcaaggccgacuacgagaagcacaagguguacgccugcgaggugacccaccagggccugagcagccccgugaccaagagcuucaacagaggcgagugcuga

SEQ ID NO: 682 - RNA, 708 nt, Artificial Sequence
  Ipilimumab LC with signale peptide
auggagacccccgcccagcuccuguuccugcuucugcucuggcugccugacacaacgggcgaaaucgugcuuacccaaagcccggggacacugucccucucucccggagagagagcuacccugagcugccgggccucccagucugucggcagcuccuaccuggcgugguaucagcagaaaccugggcaagcuccccgccuccugauuuacggagccuuuucuagagccacaggcaucccugaucgguucagcggguccggaagcggcaccgacuuuacacuuaccauuucucgccuggaacccgaggauuucgcuguuuauuacugucagcaguauggcuccagcccuuggacguuugggcagggaaccaaaguggaaaucaagagaacaguggccgcuccgucugucuucauuuuucccccuuccgacgagcaacucaaaagcggcaccgccucugugguuugccugcuuaacaauuucuacccccgggaggcgaaggugcaguggaaagucgauaacgcccugcaguccgggaauagccaggaauccgugacagagcaagacucuaaggauagcaccuauucccucagcucuacgcugacacuguccaaggcugacuacgaaaaacacaagguuuacgccugugaggugacccaucagggacucagcucuccugucacaaagagcuuuaaccgcggcgagugcuga

SEQ ID NO: 683 - RNA, 708 nt, Artificial Sequence
  Ipilimumab LC with signale peptide
auggaaacaccagcacaacuacuauucuuacuauuacuauggcuaccagacacaacaggagaaauaguacuaacacaaucaccaggaacacuaagucuaucaccaggagaaagagcaacacuaucaugcagagcaucccaaucaguuggaucuuccuaccuagccugguaucaacaaaaaccaggacaagcaccaagauuacuaauauacggagcauucucaagagcaacuggaaucccagauagauucucaggaucaggaucaggaacagacuucacauuaacaauaucacgacuagaaccagaagacuucgcaguauacuacugucaacaauacggauccucaccauggaccuucggccaaggaacaaaaguagaaauaaaaagaacaguagcagccccaucuguauucauauucccaccaucagaugaacaacuaaaaucaggaacagcaucaguaguaugcuuacuaaacaacuucuacccaagagaagccaaaguacaauggaaaguagacaacgcacuacaaucaggaaauucccaagaaucaguaacagaacaagacucaaaagacuccacauacucauuaucaucaacauuaacacuaucaaaagcagacuacgaaaaacacaaaguauacgcaugugaaguaacacaccaaggacuaucaucaccaguaacaaaaucauucaaccgaggagaaugcuga

SEQ ID NO: 684 - RNA, 708 nt, Artificial Sequence
  Ipilimumab LC with signale peptide
auggagacccccgcccagcuccuguuccuguugcugcucuggcugccagacacuaccggcgaaaucguguugacgcaaagcccggggacucugucccucagucccggugagagggcaacccugagcugccgggccucccagagugucggcagcuccuaccuggcgugguaucagcagaagccagggcaagcaccccgccuccugauuuacggcgccuuuagcagggccaccgguaucccagaucgguucuccgggaguggcagcggcacugacuuuaccuugacgauuucccgccuggaacccgaggauuucgcaguguauuacugucagcaguaugggagcaguccauggacuuuuggucagggcaccaaaguagaaaucaagaggacuguggccgcgccguccgucuucauuuuucccccaagcgacgagcaacucaaauccgggaccgccaguguggugugccugcugaacaauuucuacccccgggaggcaaagguccaguggaaaguggauaacgccuugcagagcggcaauucccaggaaagcguaaccgagcaagacaguaaggauuccacguauagccucaguuccacucugacccugagcaaggccgacuacgaaaaacacaagguguacgcaugugaggucacucaucagggucucagcuccccagugaccaaaaguuuuaaccgcggggagugcuga

SEQ ID NO: 685 - RNA, 708 nt, Artificial Sequence
  Ipilimumab LC with signale peptide
auggaaacccccgcccaacuccucuuccuauuacuccucuggcuacccgacaccaccggcgaaaucguccucacccaauccccaggcacccucucucucucccccggagaacgcgcaacacucuccugccgugcaucccaauccgucggaucuuccuaccucgccugguaccaacaaaaacccggccaagccccacgccuccucaucuacggcgccuucucccgcgccaccggcauuccagaccguuucucaggauccggcuccggcaccgauuucacacucaccaucucccgccuagaaccagaagacuucgccguauacuacugccagcaauacggaucuucccccuggacauucggccaaggcaccaaagucgaaaucaaacgcaccgucgcagcccccuccgucuucaucuucccacccuccgacgaacaacuaaaaucuggcacagcauccgucgucugccuccuaaacaacuucuacccccgcgaagccaaaguccaauggaaagucgacaacgcacuccaaucuggcaacucacaagaauccgucacagaacaagacuccaaagacucaaccuacucccucuccucaacccucacccucuccaaagccgacuacgaaaaacacaaggucuacgcaugcgaagucacccaucaaggacucuccucccccgucaccaaauccuucaaccgcggcgaaugcuaa

SEQ ID NO: 686 - RNA, 708 nt, Artificial Sequence
  Ipilimumab LC with signale peptide
auggaaacacccgcccaacuccucuuccuccuccuccucuggcuacccgacaccaccggcgaaaucguccucacccaaucccccggcacccuaucccucucccccggcgaacgcgccacccuauccugccgcgcaucccaauccguaggauccuccuaccucgccugguaccaacaaaaacccggccaagcaccccgccuccucaucuacggagccuucucccgcgccaccggcaucccugaccgcuucuccggcucaggcucaggcaccgacuucacccucaccaucucucgccuagaacccgaagacuucgccguauacuauugccaacaauacggcuccuccccuuggaccuucggccaaggaacaaaagucgaaaucaaacgaaccgucgccgcccccucagucuucaucuucccacccuccgacgaacaacucaaauccgguaccgccuccgucgucugccuucucaacaacuucuacccccgagaagccaaaguacaauggaaagucgacaacgcacuacaaucaggcaacucccaagaauccgucaccgaacaagauuccaaagacucaaccuacucacucuccuccacacucacccucuccaaagccgacuacgaaaaacacaaagucuacgccugcgaagucacccaccaaggacucuccagccccgucaccaaauccuucaaccgcggcgaaugcuaa

SEQ ID NO: 687 - RNA, 708 nt, Artificial Sequence
  Ipilimumab LC with signale peptide
auggaaacucccgcccaacuacucuuccuccuccuccucuggcuccccgacaccaccggcgaaaucguccuuacccagucccccggcacccucucacucucccccggcgaacgcgccacccuauccugucgcgccucccaaucagucggcucaucauaccucgccugguaccaacaaaaacccggccaagccccucgccuccucauauacggcgccuucucccgcgccaccggcauccccgaccgauucuccggcuccggcuccggcacugacuucacccucaccauaucccgccucgaacccgaagacuucgcagucuacuacugccaacaauacggaucuucccccuggaccuucggccaaggcaccaaagucgaaaucaaacgcaccgucgccgcccccuccgucuucauauucccacccucagacgaacaacucaaaucaggcaccgcauccgucgucugccuccucaacaacuucuacccccgcgaagccaaaguccaauggaaagucgacaacgcccuccaaucaggcaacucacaagaauccgucacagaacaagacuccaaagacucaaccuacucccucuccucaacccucacacucuccaaagccgacuacgaaaaacacaaagucuacgccugcgaagucacccaccaaggacuuuccucacccgucaccaaauccuucaaccgcggcgaaugcuaa

SEQ ID NO: 688 - RNA, 708 nt, Artificial Sequence
  Ipilimumab LC with signale peptide
auggaaacaccagcacaacuauuauuccuauuacuucuauggcuaccagacacaacaggagaaauaguauuaacacaaagcccaggaacacucucauuaucaccaggagaaagagcaacacucucaugccgagcaucccaauccgucggaucaucauaucuagcaugguaccaacaaaaaccaggacaagcacccagacuacuaauauacggagcauuuucaagagccacaggaaucccagacagauuuucaggaucaggaucaggaacagacuucacauuaacaauaucacgauuagaacccgaagacuucgcaguauacuacugccaacaauacggaucaucucccuggacauucggacaaggcacaaaaguagaaauaaaacgaacagucgcagcaccaucaguauucauauucccaccaucagacgaacaacuaaaaucaggaacagcaucaguaguaugccuauuaaauaacuucuacccaagagaagcaaaaguccaauggaaaguagauaacgcacuacaaucaggaaacucucaagaaucaguaaccgaacaagacucaaaagauucaaccuacucauuaucaucaacauuaacacuaucaaaagcagacuacgaaaaacacaaaguauacgcaugcgaaguaacccaccaaggccuaucaucaccaguaacaaaaucauucaacagaggagaaugcuga

SEQ ID NO: 689 - RNA, 708 nt, Artificial Sequence
  Ipilimumab LC with signale peptide
auggaaaccccugcccaauuacuauucuuauuauuacucuggcuaccagacacaacaggagaaauaguuuuaacacaaucaccaggcacacuaucacuaucaccaggagaaagagcaacacuaucaugcagagccucacaaucagucggaucaucauaccuagcaugguaucaacaaaaacccggacaagcaccaagauuauuaauauauggagcauucucacgagcaaccggaauaccagauagauucucaggaucaggaagcggcaccgacuucacauuaacaauaucuagacuagaaccagaagauuucgcaguauacuacugccaacaauauggaucuucaccauggacauucggacaaggaacaaaaguugaaauaaaaagaacaguagcagcaccaucaguauucauauucccaccaucagacgaacaauuaaaaucaggaacagccucuguaguaugccuauuaaacaacuuuuacccaagagaagcaaaaguucaauggaaaguagacaaugcacuacaaucaggcaacucacaagaaucaguaacagaacaagacucuaaagacucaacauauagccuaucaucaacacucacccuaucaaaagcagacuacgaaaaacacaaaguauacgcaugugaaguaacacaccaaggacuaucaucaccaguaacaaaaucauucaacagaggagaaugcuaa

SEQ ID NO: 690 - RNA, 708 nt, Artificial Sequence
  Ipilimumab backbone Rituximab LC with signale peptide
auggagacccccgcccagcugcucuuccugcugcuccuguggcugccggacaccacgggcgagaucgugcugacccagagccccggcacccucucccugagcccgggggagcgcgccacgcuguccugccgggccagccaguccgucggcagcuccuaccucgcgugguaccagcagaagcccgggcaggcgccccgccugcugaucuacggcgccuucagccgggccaccgggauccccgaccgcuucuccggcagcggcuccgggaccgacuucacccucacgaucagccggcuggagccggaggacuucgccguguacuacugccagcaguacggcuccagccccuggaccuucgggcagggcaccaagguggagaucaagcgcaccguggcggcccccagcguguucaucuucccgcccagcgacgagcagcugaagagcgggaccgccucggucgugugccuccugaacaacuucuacccccgggaggccaaggugcaguggaaggucgacaacgcgcugcagagcggcaacagccaggagagcgugacggagcaggacagcaaggacagcaccuacucgcucagcagcacccugacccugagcaaggccgacuacgagaagcacaagguguacgccugcgaggucacgcaccaggggcucagcucgcccgugaccaagagcuucaaccgcggggagugcuga

SEQ ID NO: 691 - RNA, 708 nt, Artificial Sequence
  Ipilimumab backbone Rituximab LC with signale peptide
auggagacccccgcccagcuucucuuccuucuguuguuauggcugccugacacaacuggcgaaaucgugcuaacgcaaagcccagggacccucucccugucuccgggagagagagcuacacuuucaugcagggcaagucagagcgucgguuccucuuaccuggccugguaucagcagaagcccggccaagcgccucgguugcucauuuacggggcuuuuucgcgcgccacuggaauaccagaucgauucucaggcagcgguagugggaccgacuuuacacugaccaucucccgucuggaacccgaggauuucgcaguuuauuacugucagcaguauggaucuagcccuuggacuuuuggccagggcacaaaaguggaaauuaagagaaccguggcggcccccagcguguucaucuucccgcccagcgacgagcagcugaagagcgggaccgccucggucgugugccuccugaacaacuucuacccccgggaggccaaggugcaguggaaggucgacaacgcgcugcagagcggcaacagccaggagagcgugacggagcaggacagcaaggacagcaccuacucgcucagcagcacccugacccugagcaaggccgacuacgagaagcacaagguguacgccugcgaggucacgcaccaggggcucagcucgcccgugaccaagagcuucaaccgcggcgagugcuga

SEQ ID NO: 692 - RNA, 708 nt, Artificial Sequence
  Ipilimumab backbone Rituximab LC with signale peptide
auggagacccccgcccagcugcuguuccugcugcugcuguggcugcccgacaccaccggcgagaucgugcugacccagagccccggcacccugagccugagccccggcgagagagccacccugagcugcagagccagccagagcgugggcagcagcuaccuggccugguaccagcagaagcccggccaggcccccagacugcugaucuacggcgccuucagcagagccaccggcauccccgacagauucagcggcagcggcagcggcaccgacuucacccugaccaucagcagacuggagcccgaggacuucgccguguacuacugccagcaguacggcagcagccccuggaccuucggccagggcaccaagguggagaucaagagaaccguggcggcccccagcguguucaucuucccgcccagcgacgagcagcugaagagcgggaccgccucggucgugugccuccugaacaacuucuacccccgggaggccaaggugcaguggaaggucgacaacgcgcugcagagcggcaacagccaggagagcgugacggagcaggacagcaaggacagcaccuacucgcucagcagcacccugacccugagcaaggccgacuacgagaagcacaagguguacgccugcgaggucacgcaccaggggcucagcucgcccgugaccaagagcuucaaccgcggcgagugcuga

SEQ ID NO: 693 - protein, 215 aa, Artificial Sequence
  Ipilimumab protein LC without signale peptide
EIVLTQSPGTLSLSPGERATLSCRASQSVGSSYLAWYQQKPGQAPRLLIYGAFSRATGIPDRFSGSGSGTDFTLTISRLEPEDFAVYYCQQYGSSPWTFGQGTKVEIKRTVAAPSVFIFPPSDEQLKSGTASVVCLLNNFYPREAKVQWKVDNALQSGNSQESVTEQDSKDSTYSLSSTLTLSKADYEKHKVYACEVTHQGLSSPVTKSFNRGEC

SEQ ID NO: 694 - RNA, 648 nt, Artificial Sequence
  Ipilimumab LC without signale peptide
gagaucgugcugacccagagccccggcacccucucccugagcccgggggagcgcgccacgcuguccugccgggccagccaguccgucggcagcuccuaccucgcgugguaccagcagaagcccgggcaggcgccccgccugcugaucuacggcgccuucagccgggccaccgggauccccgaccgcuucuccggcagcggcuccgggaccgacuucacccucacgaucagccggcuggagccggaggacuucgccguguacuacugccagcaguacggcuccagccccuggaccuucgggcagggcaccaagguggagaucaagcgcaccgucgccgcccccuccguguucaucuucccgcccagcgacgagcagcugaaguccgggacggccagcguggucugccuccugaacaacuucuacccccgggaggccaaggugcaguggaagguggacaacgcgcugcaguccggcaacagccaggagagcgucaccgagcaggacuccaaggacagcaccuacucccucagcuccacccugacgcugagcaaggccgacuacgagaagcacaagguguacgccugcgaggugacccaccagggccucuccagccccgucaccaaguccuucaaccgcggggagugcuga

SEQ ID NO: 695 - RNA, 648 nt, Artificial Sequence
  Ipilimumab LC without signale peptide
gagaucguccucacccagucccccggcacccucucccucucccccggcgagcgcgccacccucuccugccgcgccucccaguccgucggcuccuccuaccucgccugguaccagcagaagcccggccaggccccccgccuccucaucuacggcgccuucucccgcgccaccggcauccccgaccgcuucuccggcuccggcuccggcaccgacuucacccucaccaucucccgccucgagcccgaggacuucgccgucuacuacugccagcaguacggcuccucccccuggaccuucggccagggcaccaaggucgagaucaagcgcaccgucgccgcccccuccgucuucaucuucccccccuccgacgagcagcucaaguccggcaccgccuccgucgucugccuccucaacaacuucuacccccgcgaggccaagguccaguggaaggucgacaacgcccuccaguccggcaacucccaggaguccgucaccgagcaggacuccaaggacuccaccuacucccucuccuccacccucacccucuccaaggccgacuacgagaagcacaaggucuacgccugcgaggucacccaccagggccucuccucccccgucaccaaguccuucaaccgcggcgagugcuga

SEQ ID NO: 696 - RNA, 648 nt, Artificial Sequence
  Ipilimumab LC without signale peptide
gagaucgugcugacccagagccccggcacacucucccuuucuccuggggaaagagccacucugucaugcagggcuagucaaagcgucggauccucuuacuuggcaugguaucagcagaagccaggucaggccccgcgguuacugauuuacggcgcguucucgcgcgcuacggggauacccgaccgauuuucaggaagcggcagugguaccgauuucacacuaacuaucucccgucucgagccugaagacuuugccguuuauuacugucaacaguaugggucuagcccauggaccuucggacagggcacaaaaguggagauuaagagaaccguagcagcccccuccguguuuaucuucccuccaucagaugaacagcugaaaaguggcacugcuagcgucgugugccuucugaacaauuuuuaccccagggaggcaaagguucaauggaaaguggacaacgccuugcagucuggaaauucccaggagucagucacagaacaggauagcaaggacaguaccuauucucucuccagcacgcugacucugucgaaggcugauuacgagaaacacaagguguacgccugugaaguaacccaucaagggcucucuuccccuguuacaaaaucauucaaccggggugagugcuga

SEQ ID NO: 697 - RNA, 648 nt, Artificial Sequence
  Ipilimumab LC without signale peptide
gagaucgugcugacccagagccccggcacccugagccugagccccggcgagagagccacccugagcugcagagccagccagagcgugggcagcagcuaccuggccugguaccagcagaagcccggccaggcccccagacugcugaucuacggcgccuucagcagagccaccggcauccccgacagauucagcggcagcggcagcggcaccgacuucacccugaccaucagcagacuggagcccgaggacuucgccguguacuacugccagcaguacggcagcagccccuggaccuucggccagggcaccaagguggagaucaagagaaccguggccgcccccagcguguucaucuucccccccagcgacgagcagcugaagagcggcaccgccagcguggugugccugcugaacaacuucuaccccagagaggccaaggugcaguggaagguggacaacgcccugcagagcggcaacagccaggagagcgugaccgagcaggacagcaaggacagcaccuacagccugagcagcacccugacccugagcaaggccgacuacgagaagcacaagguguacgccugcgaggugacccaccagggccugagcagccccgugaccaagagcuucaacagaggcgagugcuga

SEQ ID NO: 698 - RNA, 648 nt, Artificial Sequence
  Ipilimumab LC without signale peptide
gagaucgugcugacccagagccccggcacacucagccugucuccuggggaaagagccacgcuuagcugccgggcuucccaaucugucggaagcuccuaccuggccugguaucagcagaagccgggccaggcgccccgccuccugauuuacggggcuuucucuagagccaccggaaucccugaccgguuuagcggcuccgggagcggaacagauuucacccuuacaauuucucgccuggagcccgaagacuuugccguuuauuacugucaacaguauggcuccagcccuuggaccuucggccaggggacaaaaguggagaucaagagaaccguggcugcccccucugucuuuauuuucccuccguccgaugaacagcucaaaagcggaacggcuucugugguuugccugcugaacaauuuuuacccccgggaggccaaggugcaauggaaagucgacaacgcgcuccaguccggcaauagccaggaguccgugaccgaacaggauucuaaggacagcacauauucccugagcucuacccuuacacuguccaaggccgauuacgagaaacacaagguuuacgcuugugaagugacccaucaagggcucagcucuccugucacgaaauccuucaaccgcggagagugcuga

SEQ ID NO: 699 - RNA, 648 nt, Artificial Sequence
  Ipilimumab LC without signale peptide
gaaauaguacuaacacaaucaccaggaacccucucacuaucuccaggagaaagagcaacacuaagcugcagagccucacaaucagucggaucaucauaccuagcaugguaccaacaaaaaccaggacaagcccccagauuacuaaucuacggagcauucucacgagcaacaggaaucccagacagauucucagguuccggaucaggaacagacuucacacuaacaauauccagauuagaaccagaagacuucgcaguauacuacugccaacaauacggaucaucaccauggacauuuggacaaggaaccaaaguagaaaucaaaagaacaguagcagccccaucaguauuuauauucccaccaucagacgaacaacuaaaaucaggcaccgcaucaguaguaugucuauuaaacaacuucuacccaagagaagcaaaaguacaauggaaaguagacaacgcacuacaaucaggaaacucccaagaaucagucacagaacaagacucaaaagacucaacauacucacuaucaucaacacuaaccuuaucaaaagcagacuacgaaaaacacaaaguauacgcaugcgaaguaacacaccaaggauuaucauccccaguaacaaaaucauucaacagaggagaaugcuga

SEQ ID NO: 700 - RNA, 648 nt, Artificial Sequence
  Ipilimumab LC without signale peptide
gagaucgugcugacccagagccccggcacucucucccugaguccaggggaaagggccaccuugagcugccgggcaucccaaagugucgguagcuccuaccuggccugguaucagcagaagccgggccaggcgccccgccuccugauuuacggggccuucagcagggcaacgggcaucccagaccgguuuuccgguagugggagcggcacugauuucaccuugaccauuucccgccuggagcccgaagacuuugccguguauuacugucaacaguauggcagcaguccauggacuuucgggcaggguaccaaaguagagaucaagaggacgguggcagcccccuccgucuuuauuuucccaccgagcgaugaacagcucaaauccggcacugcgaguguggugugccugcugaacaauuuuuacccccgggaggccaagguccaauggaaaguggacaacgcacuccagagcggcaauucccaggagagcguaaccgaacaggauaguaaggacuccacuuauagccugaguuccaccuugacccugagcaaggccgauuacgagaaacacaagguguacgccugugaagucacgcaucaagggcucagcuccccagugacuaaaaguuucaaccgcggugagugcuga

SEQ ID NO: 701 - RNA, 648 nt, Artificial Sequence
  Ipilimumab LC without signale peptide
gaaaucguccuaacccaaucccccggcacacuaucucucuccccaggcgaacgcgcaacacuauccugccgcgccucacaaucagucggcuccuccuaccuagccugguaccaacaaaaacccggccaagcaccccgacuccucaucuacggcgccuucucccgcgccacaggcaucccagaccgcuucuccggcuccggcuccggcacagacuucacacucaccaucucacgccucgaacccgaagacuucgccgucuacuacugccaacaauacggaucaucccccuggaccuucggacaaggcaccaaagucgaaaucaaacgcaccgucgccgcccccuccgucuucaucuucccacccucagacgaacaacuaaaauccggcaccgccucaguagucugccuacuaaacaacuucuacccccgcgaagccaaaguccaauggaaagucgacaacgcccuccaauccggcaacucacaagaaucagucaccgaacaagacucaaaagacuccaccuacucccuauccuccacccucacccuaucaaaagccgacuacgaaaaacacaaaguauacgcgugcgaaguaacccaccagggccuauccucacccgucacaaaauccuucaaccgcggcgaaugcuga

SEQ ID NO: 702 - RNA, 648 nt, Artificial Sequence
  Ipilimumab LC without signale peptide
gaaaucguacuaacccaaucacccggcacccucucccucucccccggcgaacgagccacccuaucaugccgcgccucccaauccguaggcuccuccuaccuagccugguaccaacaaaaaccaggccaagcaccccgacuacucaucuacggagccuucucccgcgccaccggcauccccgaccgcuucuccggcuccggcuccggcaccgacuucacccucaccaucucccgccucgaacccgaagacuucgccgucuacuacugccaacaauacggaucaucccccuggaccuucggccaaggcaccaaagucgaaaucaaacgcaccgucgccgcccccuccgucuucauauucccacccuccgacgaacaacuaaaaucaggaaccgccuccgucgucugccuacuaaacaacuucuacccccgcgaagccaaaguacaauggaaagucgacaacgcccuccaauccggcaacucccaagaauccguaaccgaacaagacuccaaagacucaaccuauucccucuccuccacacucacacuauccaaagccgacuacgaaaaacacaaagucuacgccugcgaaguaacccaccaaggccucucaucacccgucaccaaauccuucaaccgcggcgaaugcuaa

SEQ ID NO: 703 - RNA, 648 nt, Artificial Sequence
  Ipilimumab LC without signale peptide
gaaaucguccucacccaaucccccggcacccuaucacucucacccggcgaacgcgcaacccucuccugccgagccucccaauccgucggcuccucauaccucgccugguaccaacaaaaacccggccaagcaccccgucuccucaucuacggcgccuucucacgcgccaccggcauccccgaccgcuucuccggcucuggcucaggcaccgacuucacccucaccaucucccgccucgaacccgaagacuucgccgucuacuacugccaacaauacggaucaucccccuggaccuucggccaaggcacaaaagucgaaaucaaacgcaccgucgccgccccauccgucuucaucuucccacccuccgacgaacaacucaaauccggcaccgccuccgucgucugccuccucaacaacuucuacccccgcgaagccaaaguccaauggaaagucgacaacgcccuccaauccggcaacucccaagaauccgucaccgaacaagacuccaaagacuccaccuacucacucuccuccacccuuacccucuccaaagccgacuacgaaaaacacaaagucuacgccugcgaagucacccaccaaggccucuccucccccgucaccaaauccuucaaccgcggcgaaugcuaa

SEQ ID NO: 704 - RNA, 648 nt, Artificial Sequence
  Ipilimumab LC without signale peptide
gaaauaguacuaacacaaucaccaggaacacuaucacucucaccuggagaaagagcaacauuauccugcagagcaucacaaucuguaggaucuucauaccuagcaugguaccaacaaaaaccaggacaagcaccaagauuacuaauauauggagcauuuuccagagcaacaggcauaccagacagauucucaggaucaggaucaggaaccgacuucacacuaacaauaucaagacuagaaccagaagacuucgcaguauacuacugccaacaauacggaucaucaccauggacauucggacaaggaacaaaaguagaaauaaaaagaacagucgcagcaccaucaguauucauauucccaccaucagacgaacaauuaaaauccggaacagcaucaguaguaugccuacuaaauaacuucuacccaagagaagcaaaaguacaauggaaaguagacaacgcauuacaaucaggaaacucccaagaaucaguaacagaacaagacucuaaagacucaacauacucccuaucaucaacacuaacacuaucaaaagcagacuaugaaaaacacaaaguauacgcaugcgaagucacacaucaaggacuaucaucaccaguaacaaaaucauuuaacagaggagaaugcuaa

SEQ ID NO: 705 - RNA, 648 nt, Artificial Sequence
  Ipilimumab LC without signale peptide
gaaauaguacuaacacaaucaccaggaacauuaucacuauccccaggagaaagagcaacauuaucaugcagagcaucacaaucaguaggaucaucauaccuagccugguaccaacaaaaaccaggacaagccccaagauuacuaauauacggagcauucucaagagcaacaggaauaccagacagauucucagguucuggcucaggcacagacuucacacucacaauaucaagacuagaaccagaagacuucgccguauacuacugccaacaauacggauccucaccauggacauucggacaaggaacaaaaguagaaauaaaacgaacaguagcagcaccaucaguauucauauucccaccaucagacgaacaauuaaaaucaggaacagcaucaguaguaugccuauuaaacaacuucuacccacgagaagccaaaguccaauggaaaguagauaacgcauuacaaucagguaacucacaagaaucaguaacagaacaagacuccaaagacucaacauacagccuaucaucaacacuaacauuaucaaaagcagacuaugaaaaacacaaaguauacgcaugcgagguaacacaccaaggacuaucaucaccaguaacaaaaucauucaauagaggagaaugcuaa

SEQ ID NO: 706 - protein, 215 aa, Artificial Sequence; identical to SEQ ID NO: 693
  Ipilimumab backbone Rituximab LC without signale peptide

SEQ ID NO: 707 - RNA, 648 nt, Artificial Sequence
  Ipilimumab backbone Rituximab LC without signale peptide
gagaucgugcugacccagagccccggcacccucucccugagcccgggggagcgcgccacgcuguccugccgggccagccaguccgucggcagcuccuaccucgcgugguaccagcagaagcccgggcaggcgccccgccugcugaucuacggcgccuucagccgggccaccgggauccccgaccgcuucuccggcagcggcuccgggaccgacuucacccucacgaucagccggcuggagccggaggacuucgccguguacuacugccagcaguacggcuccagccccuggaccuucgggcagggcaccaagguggagaucaagcgcaccguggcggcccccagcguguucaucuucccgcccagcgacgagcagcugaagagcgggaccgccucggucgugugccuccugaacaacuucuacccccgggaggccaaggugcaguggaaggucgacaacgcgcugcagagcggcaacagccaggagagcgugacggagcaggacagcaaggacagcaccuacucgcucagcagcacccugacccugagcaaggccgacuacgagaagcacaagguguacgccugcgaggucacgcaccaggggcucagcucgcccgugaccaagagcuucaaccgcggggagugcuga

SEQ ID NO: 708 - RNA, 648 nt, Artificial Sequence
  Ipilimumab backbone Rituximab LC without signale peptide
gagaucgugcugacccagagccccggcacacucucccuuucuccuggggaaagagccacucugucaugcagggcuagucaaagcgucggauccucuuacuuggcaugguaucagcagaagccaggucaggccccgcgguuacugauuuacggcgcguucucgcgcgcuacggggauacccgaccgauuuucaggaagcggcagugguaccgauuucacacuaacuaucucccgucucgagccugaagacuuugccguuuauuacugucaacaguaugggucuagcccauggaccuucggacagggcacaaaaguggagauuaagagaaccguggcggcccccagcguguucaucuucccgcccagcgacgagcagcugaagagcgggaccgccucggucgugugccuccugaacaacuucuacccccgggaggccaaggugcaguggaaggucgacaacgcgcugcagagcggcaacagccaggagagcgugacggagcaggacagcaaggacagcaccuacucgcucagcagcacccugacccugagcaaggccgacuacgagaagcacaagguguacgccugcgaggucacgcaccaggggcucagcucgcccgugaccaagagcuucaaccgcggugagugcuga

SEQ ID NO: 709 - RNA, 648 nt, Artificial Sequence
  Ipilimumab backbone Rituximab LC without signale peptide
gagaucgugcugacccagagccccggcacccugagccugagccccggcgagagagccacccugagcugcagagccagccagagcgugggcagcagcuaccuggccugguaccagcagaagcccggccaggcccccagacugcugaucuacggcgccuucagcagagccaccggcauccccgacagauucagcggcagcggcagcggcaccgacuucacccugaccaucagcagacuggagcccgaggacuucgccguguacuacugccagcaguacggcagcagccccuggaccuucggccagggcaccaagguggagaucaagagaaccguggcggcccccagcguguucaucuucccgcccagcgacgagcagcugaagagcgggaccgccucggucgugugccuccugaacaacuucuacccccgggaggccaaggugcaguggaaggucgacaacgcgcugcagagcggcaacagccaggagagcgugacggagcaggacagcaaggacagcaccuacucgcucagcagcacccugacccugagcaaggccgacuacgagaagcacaagguguacgccugcgaggucacgcaccaggggcucagcucgcccgugaccaagagcuucaaccgcggcgagugcuga

SEQ ID NO: 710 - RNA, 2791 nt, Artificial Sequence
  Ipilimumab opt1 IRES construct
auggagcugggccucagcuggaucuuccugcuggccauccucaagggggugcagugccaggugcagcuggucgagagcggcgggggcguggugcagcccgggcgcucccuccggcugagcugcgccgccuccggcuucaccuucagcuccuacaccaugcacuggguccgccaggcgccggggaagggccuggagugggugacguucaucagcuacgacggcaacaacaaguacuacgccgacuccgugaaggggcgguucaccaucagccgcgacaacuccaagaacacccucuaccugcagaugaacagccugcgggccgaggacaccgccaucuacuacugcgcccgcacgggcuggcucgggcccuucgacuacuggggccaggggacccuggucaccguguccagcgcguccaccaagggccccagcguguucccccuggccccguccagcaaguccacgagcggcgggaccgccgcccucggcugccuggucaaggacuacuuccccgagcccgugaccguguccuggaacagcggggcgcugaccagcggcguccacacguuccccgccgugcuccaguccagcggccuguacucccugagcuccguggucaccgugccgagcuccagccucgggacccagaccuacaucugcaacgugaaccacaagcccuccaacacgaaggucgacaagcggguggagcccaagagcugcgacaagacccacacgugcccgcccugccccgcccccgagcugcugggcgggcccuccguguuccucuucccgcccaagcccaaggacacccugaugaucagccgcacccccgaggugaccugcgucguggucgacgugucccacgaggacccggaggucaaguucaacugguacguggacggcguggagguccacaacgccaagaccaagccccgggaggagcaguacaacagcaccuaccgcgugguguccguccugacggugcuccaccaggacuggcugaacgggaaggaguacaagugcaaggugagcaacaaggcccugcccgcgcccaucgagaagaccaucuccaaggccaagggccagccgcgggagccccaggucuacacccucccgcccagccgcgacgagcugaccaagaaccaggugucccugacgugccucgugaagggcuucuaccccagcgacaucgccgucgagugggagagcaacgggcagcccgagaacaacuacaagaccacgcccccggugcuggacuccgacggcagcuucuuccuguacuccaagcucaccguggacaagagccgguggcagcaggggaacgucuucuccugcagcgugaugcacgaggcccugcacaaccacuacacccagaagucccugagccucucccccggcaagugaccaugcauuugaaagccgggggugggagauccggauugccagucugcucgauaucgcaggcuggguccgugacuacccacucccccuuuaauuccgccccucucccuccccccccccuaacguuacuggccgaagccgcuuggaauaaggccggugugcguuugucuauauguuauuuuccaccauauugccgucuuuuggcaaugugagggcccggaaaccuggcccugucuucuugacgagcauuccuaggggucuuuccccucucgccaaaggaaugcaaggucuguugaaugucgugaaggaagcaguuccucuggaagcuucuugaagacaaacaacgucuguagcgacccuuugcaggcagcggaaccccccaccuggcgacaggugccucugcggccaaaagccacguguauaagauacaccugcaaaggcggcacaaccccagugccacguugugaguuggauaguuguggaaagagucaaauggcucuccucaagcguauucaacaaggggcugaaggaugcccagaagguaccccauuguaugggaucugaucuggggccucggugcacaugcuuuacguguguuuagucgagguuaaaaaacgucuaggccccccgaaccacggggacgugguuuuccuuugaaaaacacgaugauaauagaucuaccauggagacccccgcccagcugcucuuccugcugcuccuguggcugccggacaccacgggcgagaucgugcugacccagagccccggcacccucucccugagcccgggggagcgcgccacgcuguccugccgggccagccaguccgucggcagcuccuaccucgcgugguaccagcagaagcccgggcaggcgccccgccugcugaucuacggcgccuucagccgggccaccgggauccccgaccgcuucuccggcagcggcuccgggaccgacuucacccucacgaucagccggcuggagccggaggacuucgccguguacuacugccagcaguacggcuccagccccuggaccuucgggcagggcaccaagguggagaucaagcgcaccgucgccgcccccuccguguucaucuucccgcccagcgacgagcagcugaaguccgggacggccagcguggucugccuccugaacaacuucuacccccgggaggccaaggugcaguggaagguggacaacgcgcugcaguccggcaacagccaggagagcgucaccgagcaggacuccaaggacagcaccuacucccucagcuccacccugacgcugagcaaggccgacuacgagaagcacaagguguacgccugcgaggugacccaccagggccucuccagccccgucaccaaguccuucaaccgcggggagugcuga

SEQ ID NO: 711 - RNA, 2791 nt, Artificial Sequence
  Ipilimumab opt3 IRES construct
auggagcugggccucagcuggaucuuccuucuggccauuuugaagggggugcagugccaaguccaguuaguugaauccggagguggcgugguacagcccgggagaucucugaggcuaucaugugcugcaaguggauuuaccuucagcuccuacacaaugcacugggugcggcaggccccuggcaaaggucucgagugggucacuuuuauaucuuaugacgggaacaauaaguacuaugcggauucggugaaaggacgcuucacgaucucacgagacaacagcaagaauacccuguaccuucaaaugaacagucugcgugcugaagauacagccauuuauuacugcgcaagaacuggcugguugggcccauuugacuauugggggcagggaacccucguuacaguguccucugccagcaccaaagguccguccgucuucccccuggcuccuucaaguaagagcacuucuggcgggacagcagcccugggaugucucgugaaggauuacuuuccagagcccguaaccguuuccuggaacucaggcgcuuuaacgagcggugugcauacuuucccugccguccugcagaguucugggcuuuacuccuugagcucgguggugaccgucccaucuuccucacugggaacacagacuuauaucugcaauguuaaucacaaacccaguaacaccaagguggacaaaaggguagaaccuaagagcugugauaaaacacauaccugcccaccgugucccgcgccugagcuacucggcggcccauccguguuucuguuucccccuaagccaaaggacacgcuuaugauuucucggacucccgaggucacaugcgugguuguggaugucagccacgaagacccggaggugaaauuuaauugguacguagaugggguugaagugcauaacgcaaagaccaaaccucgcgaggagcaauauaauucaacuuacagagucgugaguguccugacaguguugcaccaggacuggcucaacggaaaggaauauaaauguaagguuuccaauaaagcccugcccgcuccaaucgagaagaccauaagcaaggccaaaggucagccuagggaaccccagguguacacguuaccacccucucgggaugagcugaccaagaaccaaguaucacucacaugccuugucaaaggcuucuauccuagugacaucgcaguggaaugggagagcaaugggcagccagagaacaacuacaagacuaccccgcccguucuggacuccgauggaucuuucuucuuguacucgaaacuaacaguggacaagagccgcuggcagcaaggcaaugucuucuccuguucagugaugcacgaagcucugcauaaccacuauacucagaagagucucucucugagcccugguaaaugaccaugcauuugaaagccgggggugggagauccggauugccagucugcucgauaucgcaggcuggguccgugacuacccacucccccuuuaauuccgccccucucccuccccccccccuaacguuacuggccgaagccgcuuggaauaaggccggugugcguuugucuauauguuauuuuccaccauauugccgucuuuuggcaaugugagggcccggaaaccuggcccugucuucuugacgagcauuccuaggggucuuuccccucucgccaaaggaaugcaaggucuguugaaugucgugaaggaagcaguuccucuggaagcuucuugaagacaaacaacgucuguagcgacccuuugcaggcagcggaaccccccaccuggcgacaggugccucugcggccaaaagccacguguauaagauacaccugcaaaggcggcacaaccccagugccacguugugaguuggauaguuguggaaagagucaaauggcucuccucaagcguauucaacaaggggcugaaggaugcccagaagguaccccauuguaugggaucugaucuggggccucggugcacaugcuuuacguguguuuagucgagguuaaaaaacgucuaggccccccgaaccacggggacgugguuuuccuuugaaaaacacgaugauaauagaucuaccauggagacccccgcccagcuucucuuccuucuguuguuauggcugccugacacaacuggcgaaaucgugcuaacgcaaagcccagggacccucucccugucuccgggagagagagcuacacuuucaugcagggcaagucagagcgucgguuccucuuaccuggccugguaucagcagaagcccggccaagcgccucgguugcucauuuacggggcuuuuucgcgcgccacuggaauaccagaucgauucucaggcagcgguagugggaccgacuuuacacugaccaucucccgucuggaacccgaggauuucgcaguuuauuacugucagcaguauggaucuagcccuuggacuuuuggccagggcacaaaaguggaaauuaagagaaccguagccgcuccauccguguucaucuuucccccuucagacgagcaacucaaaagugggacggcaagcgucgugugcuuacugaacaauuucuacccaagggaggccaagguucaguggaaaguggauaacgcucugcagucuggaaauucccaggaaucagucacugagcaagacagcaaggauaguaccuauucuuuguccagcacacugacucuaucgaaggccgacuacgaaaaacacaagguguacgcgugugagguaacccaucagggucucucuuccccgguuacaaaaucauuuaaccggggcgagugcuga

SEQ ID NO: 712 - RNA, 2791 nt, Artificial Sequence
  Ipilimumab opt4 IRES construct
auggagcugggccugagcuggaucuuccugcuggccauccugaagggcgugcagugccaggugcagcugguggagagcggcggcggcguggugcagcccggcagaagccugagacugagcugcgccgccagcggcuucaccuucagcagcuacaccaugcacugggugagacaggcccccggcaagggccuggagugggugaccuucaucagcuacgacggcaacaacaaguacuacgccgacagcgugaagggcagauucaccaucagcagagacaacagcaagaacacccuguaccugcagaugaacagccugagagccgaggacaccgccaucuacuacugcgccagaaccggcuggcugggccccuucgacuacuggggccagggcacccuggugaccgugagcagcgccagcaccaagggccccagcguguucccccuggcccccagcagcaagagcaccagcggcggcaccgccgcccugggcugccuggugaaggacuacuuccccgagcccgugaccgugagcuggaacagcggcgcccugaccagcggcgugcacaccuuccccgccgugcugcagagcagcggccuguacagccugagcagcguggugaccgugcccagcagcagccugggcacccagaccuacaucugcaacgugaaccacaagcccagcaacaccaagguggacaagagaguggagcccaagagcugcgacaagacccacaccugcccccccugccccgcccccgagcugcugggcggccccagcguguuccuguucccccccaagcccaaggacacccugaugaucagcagaacccccgaggugaccugcguggugguggacgugagccacgaggaccccgaggugaaguucaacugguacguggacggcguggaggugcacaacgccaagaccaagcccagagaggagcaguacaacagcaccuacagaguggugagcgugcugaccgugcugcaccaggacuggcugaacggcaaggaguacaagugcaaggugagcaacaaggcccugcccgcccccaucgagaagaccaucagcaaggccaagggccagcccagagagccccagguguacacccugccccccagcagagacgagcugaccaagaaccaggugagccugaccugccuggugaagggcuucuaccccagcgacaucgccguggagugggagagcaacggccagcccgagaacaacuacaagaccaccccccccgugcuggacagcgacggcagcuucuuccuguacagcaagcugaccguggacaagagcagauggcagcagggcaacguguucagcugcagcgugaugcacgaggcccugcacaaccacuacacccagaagagccugagccugagccccggcaagugaccaugcauuugaaagccgggggugggagauccggauugccagucugcucgauaucgcaggcuggguccgugacuacccacucccccuuuaauuccgccccucucccuccccccccccuaacguuacuggccgaagccgcuuggaauaaggccggugugcguuugucuauauguuauuuuccaccauauugccgucuuuuggcaaugugagggcccggaaaccuggcccugucuucuugacgagcauuccuaggggucuuuccccucucgccaaaggaaugcaaggucuguugaaugucgugaaggaagcaguuccucuggaagcuucuugaagacaaacaacgucuguagcgacccuuugcaggcagcggaaccccccaccuggcgacaggugccucugcggccaaaagccacguguauaagauacaccugcaaaggcggcacaaccccagugccacguugugaguuggauaguuguggaaagagucaaauggcucuccucaagcguauucaacaaggggcugaaggaugcccagaagguaccccauuguaugggaucugaucuggggccucggugcacaugcuuuacguguguuuagucgagguuaaaaaacgucuaggccccccgaaccacggggacgugguuuuccuuugaaaaacacgaugauaauagaucuaccauggagacccccgcccagcugcuguuccugcugcugcuguggcugcccgacaccaccggcgagaucgugcugacccagagccccggcacccugagccugagccccggcgagagagccacccugagcugcagagccagccagagcgugggcagcagcuaccuggccugguaccagcagaagcccggccaggcccccagacugcugaucuacggcgccuucagcagagccaccggcauccccgacagauucagcggcagcggcagcggcaccgacuucacccugaccaucagcagacuggagcccgaggacuucgccguguacuacugccagcaguacggcagcagccccuggaccuucggccagggcaccaagguggagaucaagagaaccguggccgcccccagcguguucaucuucccccccagcgacgagcagcugaagagcggcaccgccagcguggugugccugcugaacaacuucuaccccagagaggccaaggugcaguggaagguggacaacgcccugcagagcggcaacagccaggagagcgugaccgagcaggacagcaaggacagcaccuacagccugagcagcacccugacccugagcaaggccgacuacgagaagcacaagguguacgccugcgaggugacccaccagggccugagcagccccgugaccaagagcuucaacagaggcgagugcuga

SEQ ID NO: 713 - RNA, 2175 nt, Artificial Sequence
  Ipilimumab opt1 F2A construct
auggagcugggccucagcuggaucuuccugcuggccauccucaagggggugcagugccaggugcagcuggucgagagcggcgggggcguggugcagcccgggcgcucccuccggcugagcugcgccgccuccggcuucaccuucagcuccuacaccaugcacuggguccgccaggcgccggggaagggccuggagugggugacguucaucagcuacgacggcaacaacaaguacuacgccgacuccgugaaggggcgguucaccaucagccgcgacaacuccaagaacacccucuaccugcagaugaacagccugcgggccgaggacaccgccaucuacuacugcgcccgcacgggcuggcucgggcccuucgacuacuggggccaggggacccuggucaccguguccagcgcguccaccaagggccccagcguguucccccuggccccguccagcaaguccacgagcggcgggaccgccgcccucggcugccuggucaaggacuacuuccccgagcccgugaccguguccuggaacagcggggcgcugaccagcggcguccacacguuccccgccgugcuccaguccagcggccuguacucccugagcuccguggucaccgugccgagcuccagccucgggacccagaccuacaucugcaacgugaaccacaagcccuccaacacgaaggucgacaagcggguggagcccaagagcugcgacaagacccacacgugcccgcccugccccgcccccgagcugcugggcgggcccuccguguuccucuucccgcccaagcccaaggacacccugaugaucagccgcacccccgaggugaccugcgucguggucgacgugucccacgaggacccggaggucaaguucaacugguacguggacggcguggagguccacaacgccaagaccaagccccgggaggagcaguacaacagcaccuaccgcgugguguccguccugacggugcuccaccaggacuggcugaacgggaaggaguacaagugcaaggugagcaacaaggcccugcccgcgcccaucgagaagaccaucuccaaggccaagggccagccgcgggagccccaggucuacacccucccgcccagccgcgacgagcugaccaagaaccaggugucccugacgugccucgugaagggcuucuaccccagcgacaucgccgucgagugggagagcaacgggcagcccgagaacaacuacaagaccacgcccccggugcuggacuccgacggcagcuucuuccuguacuccaagcucaccguggacaagagccgguggcagcaggggaacgucuucuccugcagcgugaugcacgaggcccugcacaaccacuacacccagaagucccugagccucucccccggcaaggugaagcagacacucaauuucgaccuucugaaguuggcuggagauguugagucuaacccaggccccauggagacccccgcccagcugcucuuccugcugcuccuguggcugccggacaccacgggcgagaucgugcugacccagagccccggcacccucucccugagcccgggggagcgcgccacgcuguccugccgggccagccaguccgucggcagcuccuaccucgcgugguaccagcagaagcccgggcaggcgccccgccugcugaucuacggcgccuucagccgggccaccgggauccccgaccgcuucuccggcagcggcuccgggaccgacuucacccucacgaucagccggcuggagccggaggacuucgccguguacuacugccagcaguacggcuccagccccuggaccuucgggcagggcaccaagguggagaucaagcgcaccgucgccgcccccuccguguucaucuucccgcccagcgacgagcagcugaaguccgggacggccagcguggucugccuccugaacaacuucuacccccgggaggccaaggugcaguggaagguggacaacgcgcugcaguccggcaacagccaggagagcgucaccgagcaggacuccaaggacagcaccuacucccucagcuccacccugacgcugagcaaggccgacuacgagaagcacaagguguacgccugcgaggugacccaccagggccucuccagccccgucaccaaguccuucaaccgcggggagugcuga

SEQ ID NO: 714 - RNA, 2175 nt, Artificial Sequence
  Ipilimumab opt3 F2A construct
auggagcugggccucagcuggaucuuccuucuggccauuuugaagggggugcagugccaaguccaguuaguugaauccggagguggcgugguacagcccgggagaucucugaggcuaucaugugcugcaaguggauuuaccuucagcuccuacacaaugcacugggugcggcaggccccuggcaaaggucucgagugggucacuuuuauaucuuaugacgggaacaauaaguacuaugcggauucggugaaaggacgcuucacgaucucacgagacaacagcaagaauacccuguaccuucaaaugaacagucugcgugcugaagauacagccauuuauuacugcgcaagaacuggcugguugggcccauuugacuauugggggcagggaacccucguuacaguguccucugccagcaccaaagguccguccgucuucccccuggcuccuucaaguaagagcacuucuggcgggacagcagcccugggaugucucgugaaggauuacuuuccagagcccguaaccguuuccuggaacucaggcgcuuuaacgagcggugugcauacuuucccugccguccugcagaguucugggcuuuacuccuugagcucgguggugaccgucccaucuuccucacugggaacacagacuuauaucugcaauguuaaucacaaacccaguaacaccaagguggacaaaaggguagaaccuaagagcugugauaaaacacauaccugcccaccgugucccgcgccugagcuacucggcggcccauccguguuucuguuucccccuaagccaaaggacacgcuuaugauuucucggacucccgaggucacaugcgugguuguggaugucagccacgaagacccggaggugaaauuuaauugguacguagaugggguugaagugcauaacgcaaagaccaaaccucgcgaggagcaauauaauucaacuuacagagucgugaguguccugacaguguugcaccaggacuggcucaacggaaaggaauauaaauguaagguuuccaauaaagcccugcccgcuccaaucgagaagaccauaagcaaggccaaaggucagccuagggaaccccagguguacacguuaccacccucucgggaugagcugaccaagaaccaaguaucacucacaugccuugucaaaggcuucuauccuagugacaucgcaguggaaugggagagcaaugggcagccagagaacaacuacaagacuaccccgcccguucuggacuccgauggaucuuucuucuuguacucgaaacuaacaguggacaagagccgcuggcagcaaggcaaugucuucuccuguucagugaugcacgaagcucugcauaaccacuauacucagaagagucucucucugagcccugguaaagugaagcagacacucaauuucgaccuucugaaguuggcuggagauguugagucuaacccaggccccauggagacccccgcccagcuucucuuccuucuguuguuauggcugccugacacaacuggcgaaaucgugcuaacgcaaagcccagggacccucucccugucuccgggagagagagcuacacuuucaugcagggcaagucagagcgucgguuccucuuaccuggccugguaucagcagaagcccggccaagcgccucgguugcucauuuacggggcuuuuucgcgcgccacuggaauaccagaucgauucucaggcagcgguagugggaccgacuuuacacugaccaucucccgucuggaacccgaggauuucgcaguuuauuacugucagcaguauggaucuagcccuuggacuuuuggccagggcacaaaaguggaaauuaagagaaccguagccgcuccauccguguucaucuuucccccuucagacgagcaacucaaaagugggacggcaagcgucgugugcuuacugaacaauuucuacccaagggaggccaagguucaguggaaaguggauaacgcucugcagucuggaaauucccaggaaucagucacugagcaagacagcaaggauaguaccuauucuuuguccagcacacugacucuaucgaaggccgacuacgaaaaacacaagguguacgcgugugagguaacccaucagggucucucuuccccgguuacaaaaucauuuaaccggggcgagugcuga

SEQ ID NO: 715 - RNA, 2175 nt, Artificial Sequence
  Ipilimumab opt4 F2A construct
auggagcugggccugagcuggaucuuccugcuggccauccugaagggcgugcagugccaggugcagcugguggagagcggcggcggcguggugcagcccggcagaagccugagacugagcugcgccgccagcggcuucaccuucagcagcuacaccaugcacugggugagacaggcccccggcaagggccuggagugggugaccuucaucagcuacgacggcaacaacaaguacuacgccgacagcgugaagggcagauucaccaucagcagagacaacagcaagaacacccuguaccugcagaugaacagccugagagccgaggacaccgccaucuacuacugcgccagaaccggcuggcugggccccuucgacuacuggggccagggcacccuggugaccgugagcagcgccagcaccaagggccccagcguguucccccuggcccccagcagcaagagcaccagcggcggcaccgccgcccugggcugccuggugaaggacuacuuccccgagcccgugaccgugagcuggaacagcggcgcccugaccagcggcgugcacaccuuccccgccgugcugcagagcagcggccuguacagccugagcagcguggugaccgugcccagcagcagccugggcacccagaccuacaucugcaacgugaaccacaagcccagcaacaccaagguggacaagagaguggagcccaagagcugcgacaagacccacaccugcccccccugccccgcccccgagcugcugggcggccccagcguguuccuguucccccccaagcccaaggacacccugaugaucagcagaacccccgaggugaccugcguggugguggacgugagccacgaggaccccgaggugaaguucaacugguacguggacggcguggaggugcacaacgccaagaccaagcccagagaggagcaguacaacagcaccuacagaguggugagcgugcugaccgugcugcaccaggacuggcugaacggcaaggaguacaagugcaaggugagcaacaaggcccugcccgcccccaucgagaagaccaucagcaaggccaagggccagcccagagagccccagguguacacccugccccccagcagagacgagcugaccaagaaccaggugagccugaccugccuggugaagggcuucuaccccagcgacaucgccguggagugggagagcaacggccagcccgagaacaacuacaagaccaccccccccgugcuggacagcgacggcagcuucuuccuguacagcaagcugaccguggacaagagcagauggcagcagggcaacguguucagcugcagcgugaugcacgaggcccugcacaaccacuacacccagaagagccugagccugagccccggcaaggugaagcagacacucaauuucgaccuucugaaguuggcuggagauguugagucuaacccaggccccauggagacccccgcccagcugcuguuccugcugcugcuguggcugcccgacaccaccggcgagaucgugcugacccagagccccggcacccugagccugagccccggcgagagagccacccugagcugcagagccagccagagcgugggcagcagcuaccuggccugguaccagcagaagcccggccaggcccccagacugcugaucuacggcgccuucagcagagccaccggcauccccgacagauucagcggcagcggcagcggcaccgacuucacccugaccaucagcagacuggagcccgaggacuucgccguguacuacugccagcaguacggcagcagccccuggaccuucggccagggcaccaagguggagaucaagagaaccguggccgcccccagcguguucaucuucccccccagcgacgagcagcugaagagcggcaccgccagcguggugugccugcugaacaacuucuaccccagagaggccaaggugcaguggaagguggacaacgcccugcagagcggcaacagccaggagagcgugaccgagcaggacagcaaggacagcaccuacagccugagcagcacccugacccugagcaaggccgacuacgagaagcacaagguguacgccugcgaggugacccaccagggccugagcagccccgugaccaagagcuucaacagaggcgagugcuga

SEQ ID NO: 716 - RNA, 987 nt, Artificial Sequence
  IL12B
augugccaccagcagcuggugaucagcugguucagccugguguuccuggccagcccccugguggccaucugggagcugaagaaggacguguacgugguggagcuggacugguaccccgacgcccccggcgagaugguggugcugaccugcgacacccccgaggaggacggcaucaccuggacccuggaccagagcagcgaggugcugggcagcggcaagacccugaccauccaggugaaggaguucggcgacgccggccaguacaccugccacaagggcggcgaggugcugagccacagccugcugcugcugcacaagaaggaggacggcaucuggagcaccgacauccugaaggaccagaaggagcccaagaacaagaccuuccugagaugcgaggccaagaacuacagcggcagauucaccugcugguggcugaccaccaucagcaccgaccugaccuucagcgugaagagcagcagaggcagcagcgacccccagggcgugaccugcggcgccgccacccugagcgccgagagagugagaggcgacaacaaggaguacgaguacagcguggagugccaggaggacagcgccugccccgccgccgaggagagccugcccaucgaggugaugguggacgccgugcacaagcugaaguacgagaacuacaccagcagcuucuucaucagagacaucaucaagcccgacccccccaagaaccugcagcugaagccccugaagaacagcagacagguggaggugagcugggaguaccccgacaccuggagcaccccccacagcuacuucagccugaccuucugcgugcaggugcagggcaagagcaagagagagaagaaggacagaguguucaccgacaagaccagcgccaccgugaucugcagaaagaacgccagcaucagcgugagagcccaggacagauacuacagcagcagcuggagcgagugggccagcgugcccugcagcuag

SEQ ID NO: 717 - RNA, 987 nt, Artificial Sequence
  IL12B
augugccaccagcagcuggugaucuccugguucagccugguguuccuggccagcccccugguggccaucugggagcugaagaaggauguguaugugguggagcuggacugguacccagaugccccuggagagaugguggugcugaccugugacaccccagaagaagauggcaucaccuggacccuggaccagagcagcgaggugcugggcagcggcaagacccugaccauccaggugaaggaguuuggagaugcuggccaguacaccugccacaagggcggggaggugcugagccacagccugcugcugcugcacaagaaggaggauggcaucuggagcacagacauccugaaggaccagaaggagcccaagaacaagaccuuccugcgcugugaggccaagaacuacagcggccgcuucaccugcugguggcugaccaccaucagcacagaccugaccuucucugugaagagcagccggggcagcagugacccccagggcgugaccuguggggccgccacccugucugcugagcgggugcggggggacaacaaggaguaugaguacagcguggagugccaggaggacagcgccugcccagcugcugaggagagccugcccaucgaggugaugguggaugcugugcacaagcugaaguaugagaacuacaccagcagcuucuucauccgggacaucaucaagccagacccccccaagaaccugcagcugaagccccugaagaacagccggcagguggagguguccugggaguacccagacaccuggagcaccccccacagcuacuucagccugaccuucugugugcaggugcagggcaagagcaagcgggagaagaaggacagagucuucacagacaagaccagcgccaccgucaucugcaggaagaaugccagcaucucugugcgggcccaggaccgcuacuacagcagcuccuggagcgagugggccucugugcccugcagcuag

SEQ ID NO: 718 - RNA, 720 nt, Artificial Sequence
  IL12A
auguggcccccaggcagcgccagccagcccccacccagcccugcugcugccaccggccugcacccugcugcccggccugugucccugcagugccgccuguccaugugcccagcccggagccugcugcugguggccacccuggugcugcuggaccaccugagccuggccaggaaccugccuguggccaccccagaccccggcauguuccccugccugcaccacagccagaaccugcugcgggcugugagcaacaugcugcagaaggcccggcagacccuggaguucuaccccugcaccagcgaggagauugaccacgaggacaucaccaaggacaagaccagcacaguggaggccugccugccccuggagcugaccaagaauggcagcugccuggccagcaggaagaccagcuucaugauggcccugugccugagcagcaucuaugaggaccugaagauguaccagguggaguucaagaccaugaaugccaagcugcugauggaccccaagaggcagaucuuccuggaccagaacaugcuggccgugauugaugagcugaugcaggcccugaacuucaacagcgagaccgugccccagaagagcagccuggaggagccagacuucuacaagaccaagaucaagcugugcauccugcugcacgccuuccgcauccgggcugugaccaucgacagagugaugagcuaccugaaugccagcuag

SEQ ID NO: 719 - RNA, 720 nt, Artificial Sequence; identical to SEQ ID NO: 718
  IL12A

SEQ ID NO: 720 - RNA, 720 nt, Artificial Sequence
  IL12A
auguggccccccggcagcgccagccagcccccccccagccccgccgccgccaccggccugcaccccgccgccagacccgugagccugcagugcagacugagcaugugccccgccagaagccugcugcugguggccacccuggugcugcuggaccaccugagccuggccagaaaccugcccguggccacccccgaccccggcauguuccccugccugcaccacagccagaaccugcugagagccgugagcaacaugcugcagaaggccagacagacccuggaguucuaccccugcaccagcgaggagaucgaccacgaggacaucaccaaggacaagaccagcaccguggaggccugccugccccuggagcugaccaagaacggcagcugccuggccagcagaaagaccagcuucaugauggcccugugccugagcagcaucuacgaggaccugaagauguaccagguggaguucaagaccaugaacgccaagcugcugauggaccccaagagacagaucuuccuggaccagaacaugcuggccgugaucgacgagcugaugcaggcccugaacuucaacagcgagaccgugccccagaagagcagccuggaggagcccgacuucuacaagaccaagaucaagcugugcauccugcugcacgccuucagaaucagagccgugaccaucgacagagugaugagcuaccugaacgccagcuag

SEQ ID NO: 721 - RNA, 720 nt, Artificial Sequence; identical to SEQ ID NO: 720
  IL12A

SEQ ID NO: 722 - RNA, 762 nt, Artificial Sequence
  IL12A
auguggcccccaggcagcgccagccagcccccacccagcccugcugcugccaccggccugcacccugcugcccggccugugucccugcagugccgccuguccaugugcccagcccggagccugcugcugguggccacccuggugcugcuggaccaccugagccuggccaggaaccugccuguggccaccccagaccccggcauguuccccugccugcaccacagccagaaccugcugcgggcugugagcaacaugcugcagaaggcccggcagacccuggaguucuaccccugcaccagcgaggagauugaccacgaggacaucaccaaggacaagaccagcacaguggaggccugccugccccuggagcugaccaagaaugaaagcugccugaacagccgggagaccagcuucaucaccaacggcagcugccuggccagcaggaagaccagcuucaugauggcccugugccugagcagcaucuaugaggaccugaagauguaccagguggaguucaagaccaugaaugccaagcugcugauggaccccaagaggcagaucuuccuggaccagaacaugcuggccgugauugaugagcugaugcaggcccugaacuucaacagcgagaccgugccccagaagagcagccuggaggagccagacuucuacaagaccaagaucaagcugugcauccugcugcacgccuuccgcauccgggcugugaccaucgacagagugaugagcuaccugaaugccagcuag

SEQ ID NO: 723 - RNA, 762 nt, Artificial Sequence; identical to SEQ ID NO: 722
  IL12A

SEQ ID NO: 724 - RNA, 762 nt, Artificial Sequence
  IL12A
auguggccccccggcagcgccagccagcccccccccagccccgccgccgccaccggccugcaccccgccgccagacccgugagccugcagugcagacugagcaugugccccgccagaagccugcugcugguggccacccuggugcugcuggaccaccugagccuggccagaaaccugcccguggccacccccgaccccggcauguuccccugccugcaccacagccagaaccugcugagagccgugagcaacaugcugcagaaggccagacagacccuggaguucuaccccugcaccagcgaggagaucgaccacgaggacaucaccaaggacaagaccagcaccguggaggccugccugccccuggagcugaccaagaacgagagcugccugaacagcagagagaccagcuucaucaccaacggcagcugccuggccagcagaaagaccagcuucaugauggcccugugccugagcagcaucuacgaggaccugaagauguaccagguggaguucaagaccaugaacgccaagcugcugauggaccccaagagacagaucuuccuggaccagaacaugcuggccgugaucgacgagcugaugcaggcccugaacuucaacagcgagaccgugccccagaagagcagccuggaggagcccgacuucuacaagaccaagaucaagcugugcauccugcugcacgccuucagaaucagagccgugaccaucgacagagugaugagcuaccugaacgccagcuag

SEQ ID NO: 725 - RNA, 762 nt, Artificial Sequence; identical to SEQ ID NO: 724
  IL12A

SEQ ID NO: 726 - RNA, 2761 nt, Artificial Sequence
  IL12 construct
gggcauacaguuguuccaucccgacaugaacucagccucccgucugaccgccccuuggccuuccuucuuccucgaucuguggaacccagggaaucugccuagugcugucuccaagcaccuuggccaugauguaaacccagagaaauuagcaucuccaucuccuuccuuauuccccacccaaaagucauuuccucuuaguucauuaccugggauuuugaugucuauguucccuccucguuauugauacacacacagagagagacaaacaaaaaaggaacuucuugaaauucccccagaagguuuugagaguuguuuucaauguugcaacaagucaguuucuaguuuaaguuuccaucagaaaggaguagaguauauaaguuccaguaccagcaacagcagcagaagaaacaacaucuguuucagggccauuggacucuccguccugcccagagcaagaugugucaccagcaguuggucaucucuugguuuucccugguuuuucuggcaucuccccucguggccauaugggaacugaagaaagauguuuaugucguagaauuggauugguauccggaugccccuggagaaauggugguccucaccugugacaccccugaagaagaugguaucaccuggaccuuggaccagagcagugaggucuuaggcucuggcaaaacccugaccauccaagucaaagaguuuggagaugcuggccaguacaccugucacaaaggaggcgagguucuaagccauucgcuccugcugcuucacaaaaaggaagauggaauuugguccacugauauuuuaaaggaccagaaagaacccaaaaauaagaccuuucuaagaugcgaggccaagaauuauucuggacguuucaccugcugguggcugacgacaaucaguacugauuugacauucagugucaaaagcagcagaggcucuucugacccccaaggggugacgugcggagcugcuacacucucugcagagagagucagaggggacaacaaggaguaugaguacucaguggagugccaggaggacagugccugcccagcugcugaggagagucugcccauugaggucaugguggaugccguucacaagcucaaguaugaaaacuacaccagcagcuucuucaucagggacaucaucaaaccugacccacccaagaacuugcagcugaagccauuaaagaauucucggcagguggaggucagcugggaguacccugacaccuggaguacuccacauuccuacuucucccugacauucugcguucagguccagggcaagagcaagagagaaaagaaagauagagucuucacggacaagaccucagccacggucaucugccgcaaaaaugccagcauuagcgugcgggcccaggaccgcuacuauagcucaucuuggagcgaaugggcaucugugcccugcaguuagguucugauccaggaugaaaauuuggaggaaaaguggaagauauuaagcaaaauguuuaaagacacaacggaauagacccaaaaagauaauuucuaucugauuugcuuuaaaacguuuuuuuaggaucacaaugauaucuuugcuguauuuguauaguuagaugcuaaaugcucauugaaacaaucagcuaauuuauguauagauuuuccagcucucaaguugccaugggccuucaugcuauuuaaauauuuaaguaauuuauguauuuauuaguauauuacuguuauuuaacguuugucugccaggauguauggaauguuucauacucuuaugaccugauccaucaggaucagucccuauuaugcaaaaugugaauuuaauuuuauuuguacugacaacuuuucaagcaaggcugcaaguacaucaguuuuaugacaaucaggaagaaugcaguguucugauaccagugccaucauacacuugugauggaugggaacgcaagagauacuuacauggaaaccugacaaugcaaaccuguugagaagauccaggagaacaagaugcuaguucccaugucugugaagacuuccuggagaugguguugauaaagcaauuuagggccacuuacacuucuaagcaaguuuaaucuuuggaugccugaauuuuaaaagggcuagaaaaaaaugauugaccagccugggaaacauaacaagaccccgucucuacaaaaaaaauuuaaaauuagccaggcgugguggcucaugcuuguggucccagcuguucaggaggaugaggcaggaggaucucuugagcccaggaggucaaggcuauggugagccgugauugugccacugcauaccagccuaggugacagaaugagacccugucucaaaaaaaaaaaugauugaaauuaaaauucagcuuuagcuuccauggcaguccucacccccaccucucuaaaagacacaggaggaugacacagaaacaccguaagugucuggaaggcaaaaagaucuuaagauucaagagagaggacaaguaguuauggcuaaggacaugaaauugucagaauggcagguggcuucuuaacagcccugugagaagcagacagaugcaaagaaaaucuggaaucccuuucucauuagcaugaaugaaccugauacacaauuaugaccagaaaauauggcuccaugaaggugcuacuuuuaaguaauguaugugcgcucuguaaagugauuacauuuguuuccuguuuguuuauuuauuuauuuauuuuugcauucugaggcugaacuaauaaaaacucuucuuuguaauc

SEQ ID NO: 727 - RNA, 591 nt, Artificial Sequence
  IL12A
auguguccagcgcgcagccuccuccuuguggcuacccugguccuccuggaccaccucaguuuggccagaaaccuccccguggccacuccagacccaggaauguucccaugccuucaccacucccaaaaccugcugagggccgucagcaacaugcuccagaagaaugagaguugccuaaauuccagagagaccucuuucauaacuaaugggaguugccuggccuccagaaagaccucuuuuaugauggcccugugccuuaguaguauuuaugaagacuugaagauguaccagguggaguucaagaccaugaaugcaaagcuucugauggauccuaagaggcagaucuuucuagaucaaaacaugcuggcaguuauugaugagcugaugcaggcccugaauuucaacagugagacugugccacaaaaauccucccuugaagaaccggauuuuuauaaaacuaaaaucaagcucugcauacuucuucaugcuuucagaauucgggcagugacuauugauagagugaugagcuaucugaaugcuuccuaaaaagcgaggucccuccaaaccguugucauuuuuauaaaacuuuga

SEQ ID NO: 728 - RNA, 786 nt, Artificial Sequence
  CD40LG
augaucgagacauauaaccagaccuccccaagauccgcagcuaccgggcugccuaucagcaugaaaaucuuuauguacuuguuaacgguguuuuugaucacgcagaugaucggaagcgcccucuuugcaguguaucugcauagaaggcuugacaaaauugaagaugagagaaaucugcacgaagacuucguguuuaugaaaaccauccaacgguguaacaccggggagcggucucuuagccugcugaauugcgaagagauuaagagccaauuugaggguuuugugaaagacaucaugcugaacaaagaggaaaccaagaaagaaaacucuuucgagaugcagaaaggugaccagaacccucagaucgccgcccacgugaucucugaggccaguuccaagacuacaucugugcuccaaugggccgaaaaaggcuacuacacuauguccaauaacuuggugacccuagagaacggaaagcaacugaccgugaaacggcagggacuguacuacauuuacgcccaggugacguucugcuccaaccgcgaagccaguucucaggcuccuuuuaucgccagucuuugccucaaaagccccgggcgauucgaaagaauccuguugagggcagcaaacacacacucauccgcuaaaccuugcgggcagcaaucgauccaucuuggcggagucuuugaacugcagcccggcgccucuguauucgugaacgucacggacccaagccaggugagccauggaacaggguuuacaucauuuggacugcuaaagcuguag

SEQ ID NO: 729 - RNA, 786 nt, Artificial Sequence
  CD40LG
augaucgagaccuacaaccagaccagccccagaagcgccgccaccggccugcccaucagcaugaagaucuucauguaccugcugaccguguuccugaucacccagaugaucggcagcgcccuguucgccguguaccugcacagaagacuggacaagaucgaggacgagagaaaccugcacgaggacuucguguucaugaagaccauccagagaugcaacaccggcgagagaagccugagccugcugaacugcgaggagaucaagagccaguucgagggcuucgugaaggacaucaugcugaacaaggaggagaccaagaaggagaacagcuucgagaugcagaagggcgaccagaacccccagaucgccgcccacgugaucagcgaggccagcagcaagaccaccagcgugcugcagugggccgagaagggcuacuacaccaugagcaacaaccuggugacccuggagaacggcaagcagcugaccgugaagagacagggccuguacuacaucuacgcccaggugaccuucugcagcaacagagaggccagcagccaggcccccuucaucgccagccugugccugaagagccccggcagauucgagagaauccugcugagagccgccaacacccacagcagcgccaagcccugcggccagcagagcauccaccugggcggcguguucgagcugcagcccggcgccagcguguucgugaacgugaccgaccccagccaggugagccacggcaccggcuucaccagcuucggccugcugaagcuguag

SEQ ID NO: 730 - RNA, 786 nt, Artificial Sequence
  CD40LG
augauugagaccuacaaccagaccagccccaggucugcugccaccggccugcccaucuccaugaagaucuucauguaccugcugacuguguuccugaucacccagaugauuggcagcgcccuguuugcuguguaccugcaccggcggcuggacaagauugaagaugaaagaaaccugcaugaagauuuuguguucaugaagaccauccagcgcugcaacacaggagagaggagccugagccugcugaacugugaggagaucaagagccaguuugagggcuuugugaaggacaucaugcugaacaaggaggagaccaagaaggagaacagcuuugagaugcagaagggggaccagaacccccagauugcugcccacgugaucagcgaggccagcagcaagaccaccucugugcugcagugggccgagaagggcuacuacaccaugagcaacaaccuggugacccuggagaauggcaagcagcugacugugaagaggcagggccuguacuacaucuaugcccaggugaccuucugcagcaaccgggaggccagcagccaggcccccuucaucgccagccugugccugaagagcccuggccgcuuugagcgcauccugcugcgggccgccaacacccacagcagcgccaagcccuguggccagcagagcauccaccugggcggcguguuugagcugcagcccggggccucuguguuugugaaugugacagaccccagccaggugucccauggaacaggcuucaccagcuuuggccugcugaagcuguag

SEQ ID NO: 731 - RNA, 786 nt, Artificial Sequence; identical to SEQ ID NO: 730
  CD40LG

SEQ ID NO: 732 - RNA, 786 nt, Artificial Sequence
  CD40LG
augauugagacguacaaucagacaagcccccgaagcgcagcgaccggacuucccauaaguaugaaaaucuuuauguaucugcugaccguguuucuuaucacccaaaugauaggcuccgcucuauuugccguguaucuccaucgcaggcuagauaaaaucgaagaugagcgaaaccugcaugaggacuuuguguucaugaagacuauucagagguguaacacaggugagcguucgcuuucucugcugaauugugaagaaaucaagucccaguuugagggcuucgucaaggauauaaugcugaacaaagaggagaccaagaaggagaacagcuucgaaaugcaaaagggagaccagaacccacaaaucgcagcucacgucauaucagaggccucaucaaaaacaacaucgguucugcaaugggcugaaaagggcuauuauaccaugucuaacaauuuggugaccuuggaaaaugguaaacagcucaccgugaagcggcagggccuuuacuacauauacgcucaggugacuuuuugcucuaaucgggaagccagcagucaggcaccauucauugcuucgcucugccugaaaagcccagggagauuugaacgcauuuuacugcgcgcugcaaacacccacucuagcgcuaagccauguggccaacaguccauacacuuaggcggaguauucgaauuacagccuggcgcuagugucuucguuaauguaacagauccaucccaagugagucacggcaccggcuucaccucuuuuggucuguugaagcuguag

SEQ ID NO: 733 - RNA, 786 nt, Artificial Sequence
  CD40LG
augaucgagaccuacaaccagaccagcccccggagcgccgccaccgguuugccuaucucuaugaagaucuucauguaccuucucacuguuuuucugauuacccagaugaucgguucugcccuguucgcaguguacuugcaccgucgucuggauaaaaucgaagacgagcggaaucuccaugaggauuucguguuuaugaagacaauacagcgcugcaacaccggcgaaagaagucucagcuugcucaacugcgaagagaucaaaagccaguuugagggguucgugaaagacaucaugcucaauaaggaggagacaaaaaaggagaacucauucgaaaugcaaaagggagaucagaacccacagaucgcggcacaugugauuucugaagccuccaguaagacuaccucaguguugcagugggccgagaaaggauacuauacaaugagcaacaaucuggucacccuggagaacggaaaacaauugacaguuaagagacagggccuguacuacauuuaugcccaggugacguucugcuccaaucgugaagcuagcagccaggccccguuuaucgcuucucuaugccugaaaaguccuggaagguuugagcgaauucugcucagagcagcgaauacccacagcagugccaaacccugugggcagcagucuauucaccuuggcggcguguucgagcugcagccgggcgcauccguguucgugaauguaacagacccgagucaagugagucacggcaccgguuuuaccaguuuugggcuuuugaaauuguag

SEQ ID NO: 734 - RNA, 786 nt, Artificial Sequence; identical to SEQ ID NO: 732
  CD40LG

SEQ ID NO: 735 - RNA, 786 nt, Artificial Sequence; identical to SEQ ID NO: 733
  CD40LG

SEQ ID NO: 736 - RNA, 786 nt, Artificial Sequence; identical to SEQ ID NO: 733
  CD40LG

SEQ ID NO: 737 - RNA, 786 nt, Artificial Sequence; identical to SEQ ID NO: 729
  CD40LG

SEQ ID NO: 738 - RNA, 786 nt, Artificial Sequence; identical to SEQ ID NO: 728
  CD40LG

SEQ ID NO: 739 - protein, 24 aa, Artificial Sequence
  signal peptide - HLA-A2-SP
MAVMAPRTLVLLLSGALALTQTWA

SEQ ID NO: 740 - protein, 25 aa, Artificial Sequence
  signal peptide - HLA-A2-SP
MAVMAPRTLVLLLSGALALTQTWAG

SEQ ID NO: 741 - protein, 23 aa, Artificial Sequence
  signal peptide - HsPLAT
MDAMKRGLCCVLLLCGAVFVSPS

SEQ ID NO: 742 - protein, 21 aa, Artificial Sequence
  signal peptide - HsPLAT
MDAMKRGLCCVLLLCGAVFVS

SEQ ID NO: 743 - protein, 22 aa, Artificial Sequence
  signal peptide - HsPLAT
MDAMKRGLCCVLLLCGAVFVSP

SEQ ID NO: 744 - protein, 27 aa, Artificial Sequence
  signal peptide - HsEPO
MGVHECPAWLWLLLSLLSLPLGLPVLG

SEQ ID NO: 745 - protein, 18 aa, Artificial Sequence
  signal peptide - HsALB
MKWVTFISLLFLFSSAYS

SEQ ID NO: 746 - protein, 18 aa, Artificial Sequence
  signal peptide - IgE
MDWTWILFLVAAATRVHS

SEQ ID NO: 747 - protein, 24 aa, Artificial Sequence
  signal peptide - HsCD5
MPMGSLQPLATLYLLGMLVASCLG

SEQ ID NO: 748 - protein, 20 aa, Artificial Sequence
  signal peptide - HsIL2
MYRMQLLSCIALSLALVTNS

SEQ ID NO: 749 - protein, 18 aa, Artificial Sequence
  signal peptide - HsCTRB2
MAFLWLLSCWALLGTTFG

SEQ ID NO: 750 - protein, 19 aa, Artificial Sequence
  signal peptide - immunoglobulin (IgG heavy chain)
MEFGLSWVFLVALFRGVQC

SEQ ID NO: 751 - protein, 19 aa, Artificial Sequence
  signal peptide - human immunoglobulin heavy chain
MDWTWRVFCLLAVTPGAHP

SEQ ID NO: 752 - protein, 19 aa, Artificial Sequence
  signal peptide - human immunoglobulin light chain
MAWSPLFLTLITHCAGSWA

SEQ ID NO: 753 - protein, 17 aa, Artificial Sequence
  signal peptide - GpLuc
MGVKVLFALICIAVAEA

SEQ ID NO: 754 - protein, 21 aa, Artificial Sequence
  signal peptide - MmIgkappa
METDTLLLWVLLLWVPGSTGD

SEQ ID NO: 755 - protein, 26 aa, Artificial Sequence
  signal peptide - NrChit1
MKTHYSSAILPILTLFVFLSINPSHG

SEQ ID NO: 756 - protein, 21 aa, Artificial Sequence
  signal peptide - ClLp1.1
MGMRMMFIMFMLVVLATTVVS

SEQ ID NO: 757 - protein, 24 aa, Artificial Sequence
  signal peptide - NgNep1
MASSLYSFLLALSIVYIFVAPTHS

SEQ ID NO: 758 - protein, 19 aa, Artificial Sequence
  signal peptide - HsAzu1
MTRLTVLALLAGLLASSRA

SEQ ID NO: 759 - protein, 16 aa, Artificial Sequence
  signal peptide - HsCD33
MPLLLLLPLLWAGALA

SEQ ID NO: 760 - protein, 19 aa, Artificial Sequence
  signal peptide - VcCtxB
MIKLKFGVFFTVLLSSAYA

SEQ ID NO: 761 - protein, 20 aa, Artificial Sequence
  signal peptide - HsCST4
MARPLCTLLLLMATLAGALA

SEQ ID NO: 762 - protein, 24 aa, Artificial Sequence
  signal peptide - HsIns-iso1
MALWMRLLPLLALLALWGPDPAAA

SEQ ID NO: 763 - protein, 17 aa, Artificial Sequence
  signal peptide - HsSPARC
MRAWIFFLLCLAGRALA

SEQ ID NO: 764 - protein, 17 aa, Artificial Sequence
  signal peptide - H1N1(Netherlands2009)-HA
MKAILVVLLYTFATANA

SEQ ID NO: 765 - protein, 30 aa, Artificial Sequence
  signal peptide - YFV
MRGLSSRKRRSHDVLTVQFLILGMLLMTGG

SEQ ID NO: 766 - protein, 25 aa, Artificial Sequence
  signal peptide - MHCII
MAISGVPVLGFFIIAVLMSAQESWA

SEQ ID NO: 767 - protein, 24 aa, Artificial Sequence
  signal peptide - JEV
MGKRSAGSIMWLASLAVVIACAGA

SEQ ID NO: 768 - protein, 30 aa, Artificial Sequence
  signal peptide - JEV
MGRKQNKRGGNEGSIMWLASLAVVIACAGA

SEQ ID NO: 769 - protein, 21 aa, Artificial Sequence
  signal peptide - JEV
MNEGSIMWLASLAVVIACAGA

SEQ ID NO: 770 - RNA, 72 nt, Artificial Sequence
  signal peptide - HLA-A2-SP
auggccgucauggcgccccgaacccucguccugcuacucucgggggcucuggcccugacccagaccugggcg

SEQ ID NO: 771 - RNA, 75 nt, Artificial Sequence
  signal peptide - HLA-A2-SP
auggccgucauggcgccccgaacccucguccugcuacucucgggggcucuggcccugacccagaccugggcgggc

SEQ ID NO: 772 - RNA, 69 nt, Artificial Sequence
  signal peptide - HsPLAT
auggaugcaaugaagagagggcucugcugugugcugcugcuguguggagcagucuucguuucgcccagc

SEQ ID NO: 773 - RNA, 63 nt, Artificial Sequence
  signal peptide - HsPLAT
auggaugcaaugaagagagggcucugcugugugcugcugcuguguggagcagucuucguuucg

SEQ ID NO: 774 - RNA, 66 nt, Artificial Sequence
  signal peptide - HsPLAT
auggaugcaaugaagagagggcucugcugugugcugcugcuguguggagcagucuucguuucgccc

SEQ ID NO: 775 - RNA, 81 nt, Artificial Sequence
  signal peptide - HsEPO
augggggugcacgaauguccugccuggcuguggcuucuccugucccugcugucgcucccucugggccucccaguccugggc

SEQ ID NO: 776 - RNA, 54 nt, Artificial Sequence
  signal peptide - HsALB
augaaguggguaaccuuuauuucccuucuuuuucucuuuagcucggcuuauucc

SEQ ID NO: 777 - RNA, 54 nt, Artificial Sequence
  signal peptide - IgE
auggacuggaccuggauccuguuccucguggccgccgcgacccgcguccacagc

SEQ ID NO: 778 - RNA, 72 nt, Artificial Sequence
  signal peptide - HsCD5
augcccauggggucucugcaaccgcuggccaccuuguaccugcuggggaugcuggucgcuuccugccucgga

SEQ ID NO: 779 - RNA, 60 nt, Artificial Sequence
  signal peptide - HsIL2
auguacaggaugcaacuccugucuugcauugcacuaagucuugcacuugucacaaacagu

SEQ ID NO: 780 - RNA, 54 nt, Artificial Sequence
  signal peptide - HsCTRB2
auggcuuuccucuggcuccucuccugcugggcccuccuggguaccaccuucggc

SEQ ID NO: 781 - RNA, 57 nt, Artificial Sequence
  signal peptide - immunoglobulin (IgG heavy chain)
auggaguuugggcugagcuggguuuuccucguugcucuuuuuagagguguccagugu

SEQ ID NO: 782 - RNA, 57 nt, Artificial Sequence
  signal peptide - human immunoglobulin heavy chain
auggacuggaccuggagggucuucuguuugcuggcuguaacuccaggcgcccacccc

SEQ ID NO: 783 - RNA, 57 nt, Artificial Sequence
  signal peptide - human immunoglobulin light chain
auggccugguccccucucuuccucacccucaucacucacugugcaggguccugggcc

SEQ ID NO: 784 - RNA, 51 nt, Artificial Sequence
  signal peptide - GpLuc
augggagugaaaguucuuuuugcccuuauuuguauugcuguggccgaggcc

SEQ ID NO: 785 - RNA, 63 nt, Artificial Sequence
  signal peptide - MmIgkappa
auggagacagacacacuccugcuaugggugcugcugcucuggguuccagguuccacaggugac

SEQ ID NO: 786 - RNA, 78 nt, Artificial Sequence
  signal peptide - NrChit1
augaagacccauuauucaucagcaauucucccgauccucacccucuucgucuuucucucgaucaauccaucccauggc

SEQ ID NO: 787 - RNA, 63 nt, Artificial Sequence
  signal peptide - ClLp1.1
augggcaugcggaugauguucaucauguuuaugcugguugucuuggcaaccacugucguuucc

SEQ ID NO: 788 - RNA, 72 nt, Artificial Sequence
  signal peptide - NgNep1
auggccucgucgcuguauucuuucuuacucgcauuaucgauaguuuacaucuuuguugccccaacacauucu

SEQ ID NO: 789 - RNA, 57 nt, Artificial Sequence
  signal peptide - HsAzu1
augacccggcugacaguccuggcccugcuggcuggucugcuggcguccucgagggcc

SEQ ID NO: 790 - RNA, 48 nt, Artificial Sequence
  signal peptide - HsCD33
augccgcugcugcuacugcugccccugcugugggcaggggcccuggcu

SEQ ID NO: 791 - RNA, 57 nt, Artificial Sequence
  signal peptide - VcCtxB
augauuaaauuaaaauuugguguuuuuuuuacaguuuuacuaucuucagcauaugca

SEQ ID NO: 792 - RNA, 60 nt, Artificial Sequence
  signal peptide - HsCST4
auggcccggccucuguguacccugcuacuccugauggcuacccuggcuggggcucuggcc

SEQ ID NO: 793 - RNA, 72 nt, Artificial Sequence
  signal peptide - HsIns-iso1
auggcccuguggaugcgccuccugccccugcuggcgcugcuggcccucuggggaccugacccagccgcagcc

SEQ ID NO: 794 - RNA, 51 nt, Artificial Sequence
  signal peptide - HsSPARC
augagggccuggaucuucuuucuccuuugccuggccgggagggcucuggca

SEQ ID NO: 795 - RNA, 51 nt, Artificial Sequence
  signal peptide - H1N1(Netherlands2009)-HA
augaaggcaauacuaguaguucugcuauauacauuugcaaccgcaaaugca

SEQ ID NO: 796 - RNA, 90 nt, Artificial Sequence
  signal peptide - YFV
augagaggauuguccucaaggaaacgccguucccaugauguucugacugugcaauuccuaauuuugggaaugcuguugaugacgggugga

SEQ ID NO: 797 - RNA, 75 nt, Artificial Sequence
  signal peptide - MHCII
auggccauaaguggagucccugugcuaggauuuuucaucauagcugugcugaugagcgcucaggaaucaugggcu

SEQ ID NO: 798 - RNA, 72 nt, Artificial Sequence
  signal peptide - JEV
auggguaaacggagcgcuggcucaaucauguggcucgcgagcuuggcaguugucauagcuugugcaggagcc

SEQ ID NO: 799 - RNA, 90 nt, Artificial Sequence
  signal peptide - JEV
augggcagaaagcaaaacaaaagaggaggaaaugaaggcucaaucauguggcucgcgagcuuggcaguugucauagcuugugcaggagcc

SEQ ID NO: 800 - RNA, 63 nt, Artificial Sequence
  signal peptide - JEV
augaaugaaggcucaaucauguggcucgcgagcuuggcaguugucauagcuugugcaggagcc

SEQ ID NO: 801 - RNA, 72 nt, Artificial Sequence
  signal peptide - HLA-A2-SP
auggccgugauggccccgcggacccugguccuccugcugagcggcgcgcucgcccugacccagacgugggcc

SEQ ID NO: 802 - RNA, 75 nt, Artificial Sequence
  signal peptide - HLA-A2-SP
auggccgugauggccccgcggacccugguccuccugcugagcggcgcgcucgcccugacccagacgugggccggg

SEQ ID NO: 803 - RNA, 69 nt, Artificial Sequence
  signal peptide - HsPLAT
auggacgccaugaagcgcggccugugcugcgugcuccugcugugcggggccgucuucgugagccccucc

SEQ ID NO: 804 - RNA, 63 nt, Artificial Sequence
  signal peptide - HsPLAT
auggacgccaugaagcgcggccugugcugcgugcuccugcugugcggggccgucuucgugagc

SEQ ID NO: 805 - RNA, 66 nt, Artificial Sequence
  signal peptide - HsPLAT
auggacgccaugaagcgcggccugugcugcgugcuccugcugugcggggccgucuucgugagcccc

SEQ ID NO: 806 - RNA, 81 nt, Artificial Sequence
  signal peptide - HsEPO
augggcgugcacgagugccccgccuggcuguggcuccugcugagccuccugucccugccgcucgggcugcccguccugggc

SEQ ID NO: 807 - RNA, 54 nt, Artificial Sequence
  signal peptide - HsALB
augaagugggugaccuucaucagccugcucuuccuguucuccagcgccuacucc

SEQ ID NO: 808 - RNA, 54 nt, Artificial Sequence; identical to SEQ ID NO: 777
  signal peptide - IgE

SEQ ID NO: 809 - RNA, 72 nt, Artificial Sequence
  signal peptide - HsCD5
augcccaugggcagccugcagccgcucgccacccuguaccugcucgggaugcugguggccuccugccugggc

SEQ ID NO: 810 - RNA, 60 nt, Artificial Sequence
  signal peptide - HsIL2
auguaccggaugcagcugcucagcugcaucgcccugucgcuggcgcucgugaccaacagc

SEQ ID NO: 811 - RNA, 54 nt, Artificial Sequence
  signal peptide - HsCTRB2
auggccuuccuguggcuccugagcugcugggcccugcucggcaccaccuucggg

SEQ ID NO: 812 - RNA, 57 nt, Artificial Sequence
  signal peptide - immunoglobulin (IgG heavy chain)
auggaguucggccugagcuggguguuccucgucgcccuguuccgcggggugcagugc

SEQ ID NO: 813 - RNA, 57 nt, Artificial Sequence
  signal peptide - human immunoglobulin heavy chain
auggacuggaccuggcgcguguucugccugcucgccgucacccccggcgcccacccg

SEQ ID NO: 814 - RNA, 57 nt, Artificial Sequence
  signal peptide - human immunoglobulin light chain
auggccuggagcccccuguuccucacccugaucacccacugcgccggcuccugggcg

SEQ ID NO: 815 - RNA, 51 nt, Artificial Sequence
  signal peptide - GpLuc
augggcgugaagguccuguucgcccucaucugcaucgccguggcggaggcc

SEQ ID NO: 816 - RNA, 63 nt, Artificial Sequence
  signal peptide - MmIgkappa
auggagaccgacacccugcuccugugggugcugcuccuguggguccccggcagcacgggggac

SEQ ID NO: 817 - RNA, 78 nt, Artificial Sequence
  signal peptide - NrChit1
augaagacccacuacagcuccgccauccugcccauccucacccuguucguguuccugagcaucaacccgucccacggc

SEQ ID NO: 818 - RNA, 63 nt, Artificial Sequence
  signal peptide - ClLp1.1
augggcaugcgcaugauguucaucauguucaugcuggugguccucgccaccaccguggugagc

SEQ ID NO: 819 - RNA, 72 nt, Artificial Sequence
  signal peptide - NgNep1
auggccagcucccuguacagcuuccuccuggcccuguccaucguguacaucuucgucgcgcccacccacagc

SEQ ID NO: 820 - RNA, 57 nt, Artificial Sequence
  signal peptide - HsAzu1
augacccgccugaccgugcucgcccugcuggccggccuccuggcgagcucccgggcc

SEQ ID NO: 821 - RNA, 48 nt, Artificial Sequence
  signal peptide - HsCD33
augccccugcuccugcugcucccgcugcugugggccggcgcccucgcg

SEQ ID NO: 822 - RNA, 57 nt, Artificial Sequence
  signal peptide - VcCtxB
augaucaagcugaaguucggcguguucuucaccguccuccugagcuccgccuacgcc

SEQ ID NO: 823 - RNA, 60 nt, Artificial Sequence
  signal peptide - HsCST4
auggcccgcccccugugcacccuccugcugcucauggccacccuggcgggcgcccuggcc

SEQ ID NO: 824 - RNA, 72 nt, Artificial Sequence
  signal peptide - HsIns-iso1
auggcccuguggaugcgccuccugccccugcucgcccugcuggcgcucuggggcccggaccccgccgccgcc

SEQ ID NO: 825 - RNA, 51 nt, Artificial Sequence
  signal peptide - HsSPARC
augcgcgccuggaucuucuuccugcucugccuggccggccgggcccuggcc

SEQ ID NO: 826 - RNA, 51 nt, Artificial Sequence
  signal peptide - H1N1(Netherlands2009)-HA
augaaggccauccuggugguccuccuguacaccuucgccaccgcgaacgcc

SEQ ID NO: 827 - RNA, 90 nt, Artificial Sequence
  signal peptide - YFV
augcggggccugagcucccgcaagcggcgcagccacgacgugcucaccguccaguuccugauccuggggaugcuccugaugaccggcggg

SEQ ID NO: 828 - RNA, 75 nt, Artificial Sequence
  signal peptide - MHCII
auggccaucagcggcgugcccguccugggguucuucaucaucgccgugcucauguccgcgcaggagagcugggcc

SEQ ID NO: 829 - RNA, 72 nt, Artificial Sequence
  signal peptide - JEV
augggcaagcgcagcgccggguccaucauguggcuggccagccucgcgguggucaucgccugcgccggcgcc

SEQ ID NO: 830 - RNA, 90 nt, Artificial Sequence
  signal peptide - JEV
augggccggaagcagaacaagcgcgggggcaacgaggggagcaucauguggcuggccucccucgccguggucaucgcgugcgccggcgcc

SEQ ID NO: 831 - RNA, 63 nt, Artificial Sequence
  signal peptide - JEV
augaacgagggcagcaucauguggcuggccucccucgccguggucaucgcgugcgccggggcc

SEQ ID NO: 832 - protein, 467 aa, Artificial Sequence; identical to SEQ ID NO: 645
  Ipilimumab backbone Rituximab HC with signale peptide

SEQ ID NO: 833 - protein, 448 aa, Artificial Sequence; identical to SEQ ID NO: 661
  Ipilimumab backbone Rituximab HC without signale peptide

SEQ ID NO: 834 - protein, 235 aa, Artificial Sequence; identical to SEQ ID NO: 677
  Ipilimumab backbone Rituximab LC with signale peptide

SEQ ID NO: 835 - protein, 386 aa, Artificial Sequence
  Ovalbumin Ova
MGSIGAASMEFCFDVFKELKVHHANENIFYCPIAIMSALAMVYLGAKDSTRTQINKVVRFDKLPGFGDSIEAQCGTSVNVHSSLRDILNQITKPNDVYSFSLASRLYAEERYPILPEYLQCVKELYRGGLEPINFQTAADQARELINSWVESQTNGIIRNVLQPSSVDSQTAMVLVNAIVFKGLWEKAFKDEDTQAMPFRVTEQESKPVQMMYQIGLFRVASMASEKMKILELPFASGTMSMLVLLPDEVSGLEQLESIINFEKLTEWTSSNVMEERKIKVYLPRMKMEEKYNLTSVLMAMGITDVFSSSANLSGISSAESLKISQAVHAAHAEINEAGREVVGSAEAGVDAASVSEEFRADHPFLFCIKHIATNAVLFFGRCVSP

SEQ ID NO: 836 - RNA, 1543 nt, Artificial Sequence
  OVA RNActive
ggggcgcugccuacggagguggcagccaucuccuucucggcaucaagcuuaccaugggcagcaucggggccgcgucgauggaguucugcuucgacguguucaaggagcugaagguccaccacgccaacgagaacaucuucuacugcccgaucgccaucaugagcgcgcucgccaugguguaccugggcgccaaggacagcacccggacgcagaucaacaaggugguccgcuucgacaagcugcccggcuucggggacucgaucgaggcgcagugcggcaccagcgugaacgugcacagcucgcuccgggacauccugaaccagaucaccaagccgaacgacgucuacagcuucagccuggccucgcggcucuacgccgaggagcgcuacccgauccugcccgaguaccugcagugcgugaaggagcucuaccggggcgggcuggagccgaucaacuuccagacggcggccgaccaggcccgggagcugaucaacagcuggguggagagccagaccaacggcaucauccgcaacguccuccagccgucgagcguggacagccagaccgcgauggugcuggucaacgccaucguguucaagggccugugggagaagacguucaaggacgaggacacccaggccaugcccuuccgggugaccgagcaggagucgaagccgguccagaugauguaccagaucgggcucuuccggguggcgagcauggccagcgagaagaugaagauccuggagcugccguucgccucgggcacgaugagcaugcucgugcugcugcccgacgaggucagcggccucgagcagcuggagucgaucaucaacuucgagaagcugaccgaguggaccagcagcaacgugauggaggagcgcaagaucaagguguaccucccgcggaugaagauggaggagaaguacaaccugacgucgguccugauggcgauggggaucaccgacguguucagcagcucggccaaccucagcggcaucagcucggccgagagccugaagaucagccaggcggugcacgccgcccacgcggagaucaacgaggccggccgggaggucguggggucggccgaggcgggcguggacgccgccagcgucagcgaggaguuccgcgcggaccacccguuccuguucugcaucaagcacaucgccaccaacgccgugcucuucuucggccggugcgugucgcccugaccacuagugcaucacauuuaaaagcaucucagccuaccaugagaauaagagaaagaaaaugaagaucaauagcuuauucaucucuuuuucuuuuucguugguguaaagccaacacccugucuaaaaaacauaaauuucuuuaaucauuuugccucuuuucucugugcuucaauuaauaaaaaauggaaagaaccuagaucuaaaaaaaaaaaaaaaaaaaaaaaaaaaaaaaaaaaaaaaaaaaaaaaaaaaaaaaaaaaaaaaaugcaucccccccccccccccccccccccccccccccaaaggcucuuuucagagccaccagaauu

SEQ ID NO: 837 - RNA, 1857 nt, Artificial Sequence
  ppLuc
gggagaaagcuugaggauggaggacgccaagaacaucaagaagggcccggcgcccuucuacccgcuggaggacgggaccgccggcgagcagcuccacaaggccaugaagcgguacgcccuggugccgggcacgaucgccuucaccgacgcccacaucgaggucgacaucaccuacgcggaguacuucgagaugagcgugcgccuggccgaggccaugaagcgguacggccugaacaccaaccaccggaucguggugugcucggagaacagccugcaguucuucaugccggugcugggcgcccucuucaucggcguggccgucgccccggcgaacgacaucuacaacgagcgggagcugcugaacagcauggggaucagccagccgaccgugguguucgugagcaagaagggccugcagaagauccugaacgugcagaagaagcugcccaucauccagaagaucaucaucauggacagcaagaccgacuaccagggcuuccagucgauguacacguucgugaccagccaccucccgccgggcuucaacgaguacgacuucgucccggagagcuucgaccgggacaagaccaucgcccugaucaugaacagcagcggcagcaccggccugccgaaggggguggcccugccgcaccggaccgccugcgugcgcuucucgcacgcccgggaccccaucuucggcaaccagaucaucccggacaccgccauccugagcguggugccguuccaccacggcuucggcauguucacgacccugggcuaccucaucugcggcuuccgggugguccugauguaccgguucgaggaggagcuguuccugcggagccugcaggacuacaagauccagagcgcgcugcucgugccgacccuguucagcuucuucgccaagagcacccugaucgacaaguacgaccugucgaaccugcacgagaucgccagcgggggcgccccgcugagcaaggaggugggcgaggccguggccaagcgguuccaccucccgggcauccgccagggcuacggccugaccgagaccacgagcgcgauccugaucacccccgagggggacgacaagccgggcgccgugggcaagguggucccguucuucgaggccaaggugguggaccuggacaccggcaagacccugggcgugaaccagcggggcgagcugugcgugcgggggccgaugaucaugagcggcuacgugaacaacccggaggccaccaacgcccucaucgacaaggacggcuggcugcacagcggcgacaucgccuacugggacgaggacgagcacuucuucaucgucgaccggcugaagucgcugaucaaguacaagggcuaccagguggcgccggccgagcuggagagcauccugcuccagcaccccaacaucuucgacgccggcguggccgggcugccggacgacgacgccggcgagcugccggccgcggugguggugcuggagcacggcaagaccaugacggagaaggagaucgucgacuacguggccagccaggugaccaccgccaagaagcugcggggcggcgugguguucguggacgaggucccgaagggccugaccgggaagcucgacgcccggaagauccgcgagauccugaucaaggccaagaagggcggcaagaucgccguguaagacuaguuauaagacugacuagcccgaugggccucccaacgggcccuccuccccuccuugcaccgagauuaauaaaaaaaaaaaaaaaaaaaaaaaaaaaaaaaaaaaaaaaaaaaaaaaaaaaaaaaaaaaaaaaauauuccccccccccccccccccccccccccccccucuagacaauuggaauu

SEQ ID NO: 838 - DNA, 54 bp, Artificial Sequence
  Mp68 (2010107E04Rik) 5-UTR
ctttcccattctgtagcagaatttggtgttgcctgtggtcttggtcccgcggag

SEQ ID NO: 839 - RNA, 54 nt, Artificial Sequence
  Mp68 (2010107E04Rik) 5-UTR
cuuucccauucuguagcagaauuugguguugccuguggucuuggucccgcggag

SEQ ID NO: 840 - DNA, 108 bp, Artificial Sequence
  Nosip 5-UTR
ctcctgtcgggcggaagtaggaggagtagagtttaaaaacagtactctttttccggttcgggacgtagttgaagcaacgacaagccggataaccgctcttgagacagg

SEQ ID NO: 841 - RNA, 108 nt, Artificial Sequence
  Nosip 5-UTR
cuccugucgggcggaaguaggaggaguagaguuuaaaaacaguacucuuuuuccgguucgggacguaguugaagcaacgacaagccggauaaccgcucuugagacagg

SEQ ID NO: 842 - DNA, 62 bp, Artificial Sequence
  HSD17B4 5-UTR
gtcccgcagtcggcgtccagcggctctgcttgttcgtgtgtgtgtcgttgcaggccttattc

SEQ ID NO: 843 - RNA, 62 nt, Artificial Sequence
  HSD17B4 5-UTR
gucccgcagucggcguccagcggcucugcuuguucgugugugugucguugcaggccuuauuc

SEQ ID NO: 844 - DNA, 84 bp, Artificial Sequence
  Rpl31 5-UTR
cccgtgacccggaagttgtacggctacgcgactttccctcccacaaaccctcgcgcccttcctttcctacttgggcccggcaga

SEQ ID NO: 845 - RNA, 84 nt, Artificial Sequence
  Rpl31 5-UTR
cccgugacccggaaguuguacggcuacgcgacuuucccucccacaaacccucgcgcccuuccuuuccuacuugggcccggcaga

SEQ ID NO: 846 - DNA, 102 bp, Artificial Sequence
  TUBB4B 5-UTR
atataagcgttggcggagcgtcggttgtagcactctgcgcgcccgctcttctgctgctgtttgtctacttcctcctgcttccccgccgccgccgccgccatc

SEQ ID NO: 847 - RNA, 102 nt, Artificial Sequence
  TUBB4B 5-UTR
auauaagcguuggcggagcgucgguuguagcacucugcgcgcccgcucuucugcugcuguuugucuacuuccuccugcuuccccgccgccgccgccgccauc

SEQ ID NO: 848 - DNA, 75 bp, Artificial Sequence; identical to SEQ ID NO: 410
  ATP5A1 5-UTR

SEQ ID NO: 849 - RNA, 75 nt, Artificial Sequence; identical to SEQ ID NO: 411
  ATP5A1 5-UTR

SEQ ID NO: 850 - DNA, 81 bp, Artificial Sequence
  Ndufa4 5-UTR
gtccgctcagccaggttgcagaagcggcttagcgtgtgtcctaatcttctctctgcgtgtaggtaggcctgtgccgcaaac

SEQ ID NO: 851 - RNA, 81 nt, Artificial Sequence
  Ndufa4 5-UTR
guccgcucagccagguugcagaagcggcuuagcguguguccuaaucuucucucugcguguagguaggccugugccgcaaac

SEQ ID NO: 852 - DNA, 70 bp, Artificial Sequence
  RPS9 3-UTR
gtccacctgtccctcctgggctgctggattgtctcgttttcctgccaaataaacaggatcagcgctttac

SEQ ID NO: 853 - RNA, 70 nt, Artificial Sequence
  RPS9 3-UTR
guccaccugucccuccugggcugcuggauugucucguuuuccugccaaauaaacaggaucagcgcuuuac

SEQ ID NO: 854 - DNA, 57 bp, Artificial Sequence
  PSMB3 3-UTR
ccctgttcccagagcccacttttttttctttttttgaaataaaatagcctgtctttc

SEQ ID NO: 855 - RNA, 57 nt, Artificial Sequence
  PSMB3 3-UTR
cccuguucccagagcccacuuuuuuuucuuuuuuugaaauaaaauagccugucuuuc

SEQ ID NO: 856 - DNA, 121 bp, Artificial Sequence
  CASP1 3-UTR
aataaggaaactgtatgaatgtctgtgggcaggaagtgaagagatccttctgtaaaggtttttggaattatgtctgctgaataataaacttttttgaaataataaatctggtagaaaaatg

SEQ ID NO: 857 - RNA, 121 nt, Artificial Sequence
  CASP1 3-UTR
aauaaggaaacuguaugaaugucugugggcaggaagugaagagauccuucuguaaagguuuuuggaauuaugucugcugaauaauaaacuuuuuugaaauaauaaaucugguagaaaaaug

SEQ ID NO: 858 - DNA, 137 bp, Artificial Sequence
  COX6B1 3-UTR
actggctgcatctccctttcctctgtcctccatccttctcccaggatggtgaagggggacctggtacccagtgatccccaccccaggatcctaaatcatgacttacctgctaataaaaactcattggaaaagtgaga

SEQ ID NO: 859 - RNA, 137 nt, Artificial Sequence
  COX6B1 3-UTR
acuggcugcaucucccuuuccucuguccuccauccuucucccaggauggugaagggggaccugguacccagugauccccaccccaggauccuaaaucaugacuuaccugcuaauaaaaacucauuggaaaagugaga

SEQ ID NO: 860 - RNA, 1621 nt, Artificial Sequence; identical to SEQ ID NO: 594
  Ipilimumab HC with signale peptide

SEQ ID NO: 861 - RNA, 1621 nt, Artificial Sequence
  Ipilimumab HC with signale peptide
gggagaaagcuuaccauggagcucggccucuccuggaucuuccuccucgccauccucaagggcguccagugccagguccagcucgucgaguccggcggcggcgucguccagcccggccgcucccuccgccucuccugcgccgccuccggcuucaccuucuccuccuacaccaugcacuggguccgccaggcccccggcaagggccucgagugggucaccuucaucuccuacgacggcaacaacaaguacuacgccgacuccgucaagggccgcuucaccaucucccgcgacaacuccaagaacacccucuaccuccagaugaacucccuccgcgccgaggacaccgccaucuacuacugcgcccgcaccggcuggcucggccccuucgacuacuggggccagggcacccucgucaccgucuccuccgccuccaccaagggccccuccgucuucccccucgcccccuccuccaaguccaccuccggcggcaccgccgcccucggcugccucgucaaggacuacuuccccgagcccgucaccgucuccuggaacuccggcgcccucaccuccggcguccacaccuuccccgccguccuccaguccuccggccucuacucccucuccuccgucgucaccguccccuccuccucccucggcacccagaccuacaucugcaacgucaaccacaagcccuccaacaccaaggucgacaagcgcgucgagcccaaguccugcgacaagacccacaccugcccccccugccccgcccccgagcuccucggcggccccuccgucuuccucuucccccccaagcccaaggacacccucaugaucucccgcacccccgaggucaccugcgucgucgucgacgucucccacgaggaccccgaggucaaguucaacugguacgucgacggcgucgagguccacaacgccaagaccaagccccgcgaggagcaguacaacuccaccuaccgcgucgucuccguccucaccguccuccaccaggacuggcucaacggcaaggaguacaagugcaaggucuccaacaaggcccuccccgcccccaucgagaagaccaucuccaaggccaagggccagccccgcgagccccaggucuacacccucccccccucccgcgacgagcucaccaagaaccaggucucccucaccugccucgucaagggcuucuaccccuccgacaucgccgucgagugggaguccaacggccagcccgagaacaacuacaagaccaccccccccguccucgacuccgacggcuccuucuuccucuacuccaagcucaccgucgacaagucccgcuggcagcagggcaacgucuucuccugcuccgucaugcacgaggcccuccacaaccacuacacccagaagucccucucccucucccccggcaagugaggacuaguuauaagacugacuagcccgaugggccucccaacgggcccuccuccccuccuugcaccgagauuaauaaaaaaaaaaaaaaaaaaaaaaaaaaaaaaaaaaaaaaaaaaaaaaaaaaaaaaaaaaaaaaaaugcaucccccccccccccccccccccccccccccccaaaggcucuuuucagagccaccagaauu

SEQ ID NO: 862 - RNA, 1621 nt, Artificial Sequence
  Ipilimumab HC with signale peptide
gggagaaagcuuaccauggagcugggccucagcuggaucuuccuucuggccauuuugaagggggugcagugccaaguccaguuaguugaauccggagguggcgugguacagcccgggagaucucugaggcuaucaugugcugcaaguggauuuaccuucagcuccuacacaaugcacugggugcggcaggccccuggcaaaggucucgagugggucacuuuuauaucuuaugacgggaacaauaaguacuaugcggauucggugaaaggacgcuucacgaucucacgagacaacagcaagaauacccuguaccuucaaaugaacagucugcgugcugaagauacagccauuuauuacugcgcaagaacuggcugguugggcccauuugacuauugggggcagggaacccucguuacaguguccucugccagcaccaaagguccguccgucuucccccuggcuccuucaaguaagagcacuucuggcgggacagcagcccugggaugucucgugaaggauuacuuuccagagcccguaaccguuuccuggaacucaggcgcuuuaacgagcggugugcauacuuucccugccguccugcagaguucugggcuuuacuccuugagcucgguggugaccgucccaucuuccucacugggaacacagacuuauaucugcaauguuaaucacaaacccaguaacaccaagguggacaaaaggguagaaccuaagagcugugauaaaacacauaccugcccaccgugucccgcgccugagcuacucggcggcccauccguguuucuguuucccccuaagccaaaggacacgcuuaugauuucucggacucccgaggucacaugcgugguuguggaugucagccacgaagacccggaggugaaauuuaauugguacguagaugggguugaagugcauaacgcaaagaccaaaccucgcgaggagcaauauaauucaacuuacagagucgugaguguccugacaguguugcaccaggacuggcucaacggaaaggaauauaaauguaagguuuccaauaaagcccugcccgcuccaaucgagaagaccauaagcaaggccaaaggucagccuagggaaccccagguguacacguuaccacccucucgggaugagcugaccaagaaccaaguaucacucacaugccuugucaaaggcuucuauccuagugacaucgcaguggaaugggagagcaaugggcagccagagaacaacuacaagacuaccccgcccguucuggacuccgauggaucuuucuucuuguacucgaaacuaacaguggacaagagccgcuggcagcaaggcaaugucuucuccuguucagugaugcacgaagcucugcauaaccacuauacucagaagagucucucucugagcccugguaaaugaggacuaguuauaagacugacuagcccgaugggccucccaacgggcccuccuccccuccuugcaccgagauuaauaaaaaaaaaaaaaaaaaaaaaaaaaaaaaaaaaaaaaaaaaaaaaaaaaaaaaaaaaaaaaaaaugcaucccccccccccccccccccccccccccccccaaaggcucuuuucagagccaccagaauu

SEQ ID NO: 863 - RNA, 1621 nt, Artificial Sequence
  Ipilimumab HC with signale peptide
gggagaaagcuuaccauggagcugggccugagcuggaucuuccugcuggccauccugaagggcgugcagugccaggugcagcugguggagagcggcggcggcguggugcagcccggcagaagccugagacugagcugcgccgccagcggcuucaccuucagcagcuacaccaugcacugggugagacaggcccccggcaagggccuggagugggugaccuucaucagcuacgacggcaacaacaaguacuacgccgacagcgugaagggcagauucaccaucagcagagacaacagcaagaacacccuguaccugcagaugaacagccugagagccgaggacaccgccaucuacuacugcgccagaaccggcuggcugggccccuucgacuacuggggccagggcacccuggugaccgugagcagcgccagcaccaagggccccagcguguucccccuggcccccagcagcaagagcaccagcggcggcaccgccgcccugggcugccuggugaaggacuacuuccccgagcccgugaccgugagcuggaacagcggcgcccugaccagcggcgugcacaccuuccccgccgugcugcagagcagcggccuguacagccugagcagcguggugaccgugcccagcagcagccugggcacccagaccuacaucugcaacgugaaccacaagcccagcaacaccaagguggacaagagaguggagcccaagagcugcgacaagacccacaccugcccccccugccccgcccccgagcugcugggcggccccagcguguuccuguucccccccaagcccaaggacacccugaugaucagcagaacccccgaggugaccugcguggugguggacgugagccacgaggaccccgaggugaaguucaacugguacguggacggcguggaggugcacaacgccaagaccaagcccagagaggagcaguacaacagcaccuacagaguggugagcgugcugaccgugcugcaccaggacuggcugaacggcaaggaguacaagugcaaggugagcaacaaggcccugcccgcccccaucgagaagaccaucagcaaggccaagggccagcccagagagccccagguguacacccugccccccagcagagacgagcugaccaagaaccaggugagccugaccugccuggugaagggcuucuaccccagcgacaucgccguggagugggagagcaacggccagcccgagaacaacuacaagaccaccccccccgugcuggacagcgacggcagcuucuuccuguacagcaagcugaccguggacaagagcagauggcagcagggcaacguguucagcugcagcgugaugcacgaggcccugcacaaccacuacacccagaagagccugagccugagccccggcaagugaggacuaguuauaagacugacuagcccgaugggccucccaacgggcccuccuccccuccuugcaccgagauuaauaaaaaaaaaaaaaaaaaaaaaaaaaaaaaaaaaaaaaaaaaaaaaaaaaaaaaaaaaaaaaaaaugcaucccccccccccccccccccccccccccccccaaaggcucuuuucagagccaccagaauu

SEQ ID NO: 864 - RNA, 1621 nt, Artificial Sequence
  Ipilimumab HC with signale peptide
gggagaaagcuuaccauggagcugggccucagcuggaucuuccugcuugccauucugaagggggugcagugccaaguccagcucguugaauccggaggcgggguggugcagcccggaagaucucugcggcuuagcugugcugccuccggcuuuaccuucucuagcuacacaaugcacuggguccgccaggcgccugggaaaggacuggagugggugacguuuaucuccuaugacggcaacaauaaguacuaugcugauucuguuaaaggcagauucaccauuagccgggacaacuccaagaauacacucuaccugcaaaugaacagccugcgcgccgaagauaccgccaucuauuacugcgcuagaacaggguggcucggaccguuugacuauuggggccaggggacccuggugacagucucuuccgccagcaccaaaggacccucuguguucccucuugcucccuccagcaagucuacguccggcgggaccgccgcgcugggaugucucguuaaggauuacuuuccugagcccgugacagucagcuggaacuccggcgcccugaccucuggcgugcauacauucccugcugugcuucagagcuccgggcuguacagccucucuuccgucguuaccgugccgagcucuagccugggaacgcagacauauauuugcaaugugaaucacaaacccuccaacaccaaggucgacaaacggguggaaccuaagucuugugauaaaacacauaccugucccccuugccccgccccggagcugcucggcgggccuagcguuuuucuguuucccccuaagcccaaggacacccuuaugaucucccgcacacccgaggugacgugcgucgugguugaugugagccacgaagacccugaggucaaauucaauugguacguggauggagucgaagugcauaacgcuaagaccaaaccgagagaggagcaauauaauucuacauaccggguuguguccguccugaccgugcuccaccaggacuggcugaacggcaaggaauauaaauguaagguuagcaauaaagcccuucccgcgccuaucgagaagacaauuucuaaggccaaagggcagccccgcgaaccucagguguacacccugcccccguccagagaugagcucacgaagaaccaagucagccugacaugccuggugaaaggauucuauccuuccgacaucgcuguggaaugggagucuaauggccagcccgagaacaacuacaagaccaccccucccguucucgacagcgauggcuccuuuuuccuguacucuaaacuuacagucgacaagagccgguggcagcaagggaauguguucuccuguagcgugaugcacgaagcccugcauaaccacuauacccagaagucucucucccugagcccuggaaaaugaggacuaguuauaagacugacuagcccgaugggccucccaacgggcccuccuccccuccuugcaccgagauuaauaaaaaaaaaaaaaaaaaaaaaaaaaaaaaaaaaaaaaaaaaaaaaaaaaaaaaaaaaaaaaaaaugcaucccccccccccccccccccccccccccccccaaaggcucuuuucagagccaccagaauu

SEQ ID NO: 865 - RNA, 1621 nt, Artificial Sequence
  Ipilimumab HC with signale peptide
gggagaaagcuuaccauggaauuagguuuauccuggaucuuucuccuagcaauacucaaaggaguacaaugccaaguacaauuaguggaauccggaggagguguaguacaaccaggaagaucacuaagacuaucaugcgcagcaucaggauuuacauucucaucauacacaaugcacuggguaagacaagccccaggaaaaggauuagaauggguuacauuuauauccuacgacggaaacaauaaauacuacgcagacucagucaaaggaagauucacuauaucaagagacaauucuaaaaacacacuauaccuacaaaugaacucucuccgagcagaagauacagccauauacuacugcgcaagaacaggaugguuaggaccuuucgacuacuggggacaaggaacucuaguaacugucucaucugccucaacaaaaggcccaucaguauuuccacuagccccaucaucuaaaucuacaucagguggaaccgcugcauuaggaugcuuaguaaaagacuauuuucccgaaccaguaacuguaucuuggaacuccggagcacuuacuucugguguacacacauucccagcaguuuuacaaagcucaggacuauacucucuaagcucaguaguaacugucccaucaucaucccuuggcacccaaacauacauauguaacguaaaucacaaacccaguaauaccaaaguagacaaaagaguagaacccaaaucaugugauaaaacacacacaugcccccccugcccagcaccugaacuucuaggaggaccaucuguauuccucuucccuccaaaaccaaaagauacucucaugauaucacgcacacccgaaguaacuugugucguaguagacguaucacacgaagacccagaaguuaaauucaacugguauguagacggaguagaaguccacaacgcaaaaacaaaaccacgagaagaacaauacaacuccaccuaucgcguaguuucaguacuuacaguucuccaccaagauuggcuaaacggaaaagaauacaaaugcaaaguaucaaauaaagcuuuaccugcaccaauagaaaaaacaauaaguaaagcaaaaggucaaccacgagaaccccaaguauauacacuuccaccaucaagagacgaacuuaccaaaaaccaagucucacucacaugcuuaguaaaaggauuuuacccaucagauauagcaguagaaugggaauccaauggacaaccagaaaauaauuacaaaaccacaccaccuguacuagauucagacggcucuuucuuucuauacucuaaacuaacaguugauaaaucacgauggcaacaaggcaauguauucucuuguucugucaugcaugaagcacuacacaaccacuacacacaaaaaucacuaucacuaucccccggcaaaugaggacuaguuauaagacugacuagcccgaugggccucccaacgggcccuccuccccuccuugcaccgagauuaauaaaaaaaaaaaaaaaaaaaaaaaaaaaaaaaaaaaaaaaaaaaaaaaaaaaaaaaaaaaaaaaaugcaucccccccccccccccccccccccccccccccaaaggcucuuuucagagccaccagaauu

SEQ ID NO: 866 - RNA, 1621 nt, Artificial Sequence
  Ipilimumab HC with signale peptide
gggagaaagcuuaccauggagcugggccucagcuggaucuuccuguuggccauucugaagggggugcagugccaaguccagcucguggaauccgguggcgggguagugcagcccggcaggagucugcgguugagcugugcagccuccgguuuuaccuucaguagcuacacuaugcacuggguccgccaggcgccagggaaaggccuggagugggugaccuuuaucuccuaugacggcaacaauaaguacuaugccgauagcgugaaagggagguucacgauuucccgggacaacaguaagaauacucucuaccugcaaaugaacagccugcgcgcagaagauaccgccaucuauuacugcgcaaggaccgguuggcucggcccguuugacuauugggggcagggcacucuggucaccguguccagcgccaguacgaaaggucccuccguauucccauuggcgcccagcuccaagaguacuagcgggggcaccgccgcacugggcugucucgugaaggauuacuuuccagagcccgucacuguguccuggaauagcggggcccugaccaguggugugcauaccuucccagccguccugcaguccagcggcuuguacagucucuccagcgugguaacggugccgagcuccagucuggggacucagaccuauauuugcaacgucaaucacaaacccagcaacacuaagguggacaaacggguggaaccaaaguccugugauaaaacccauaccugucccccaugccccgcaccggagcugcucggcggucccagcgucuuucuguucccacccaagccaaaagacacuuugaugaucagucgcacgcccgaggugaccugcguaguggucgaugugucccacgaagacccagaggucaaguuuaauugguacguggauggcguggaaguacauaacgccaagacuaaaccgagggaggagcaauauaauagcaccuaccggguggucuccgugcugaccguccuccaccaggacuggcugaacgggaaggaauauaaauguaaggugaguaauaaagcgcugcccgccccaaucgagaagacuauuagcaaggcaaaaggccagccccgcgaaccacagguguacacguugcccccguccagggaugagcucaccaagaaccaaguaagccugacuugccuggugaaaggguucuauccaagugacaucgccgucgaaugggaguccaauggucagcccgagaacaacuacaagaccacucccccagugcucgacagcgauggcuccuucuuucuguacaguaaauugaccgucgacaagagccgguggcagcaagggaauguguucuccugcagcgugaugcacgaagcacugcauaaccacuauacgcagaagagucucucccugagccccggcaaaugaggacuaguuauaagacugacuagcccgaugggccucccaacgggcccuccuccccuccuugcaccgagauuaauaaaaaaaaaaaaaaaaaaaaaaaaaaaaaaaaaaaaaaaaaaaaaaaaaaaaaaaaaaaaaaaaugcaucccccccccccccccccccccccccccccccaaaggcucuuuucagagccaccagaauu

SEQ ID NO: 867 - RNA, 1621 nt, Artificial Sequence
  Ipilimumab HC with signale peptide
gggagaaagcuuaccauggaacucggccuaagcuggaucuuccuccuggccauccucaaaggcguacagugccagguccaacucguagaauccggaggcggcgucguacaacccggccgcucccuccgccuauccugcgcagcuuccggcuucacauucaguucauacaccaugcacuggguccgacaagcccccggcaaaggacucgaaugggucacuuuuaucucuuacgacggcaacaauaaauacuacgcagacuccgucaaaggccgcuuuacaaucucacgugacaacuccaaaaacacccuauaccuccaaaugaacucccuacgcgcugaagacaccgccauuuacuauugcgcccgcacaggcuggcuuggaccauucgacuacuggggacaaggaacccuugucaccgucuccucugccagcaccaaaggccccuccgucuucccccucgcucccagcuccaaauccacgucaggcggcacugcagcccucggaugccuagucaaagacuacuuccccgaacccgucacagucucauggaacuccggagcccucacuucaggcguccacaccuuccccgcaguacuacaaucuucaggccuauacucccuaagcuccgucgucaccguacccuccucaucccucggaacacaaaccuacauaugcaacgucaaccacaaacccucaaacacaaaaguagacaaacgcgucgaacccaaauccugcgacaaaacccauaccugcccacccugccccgccccggaacuccuaggcggccccagcgucuucuuauucccacccaaacccaaagacacgcucaugauaaguagaacccccgaagugaccugcgucgucgucgacgucucccacgaagacccugaaguuaaauucaacugguacgucgacggcgucgaaguucacaacgccaaaaccaaaccccgagaagaacaauacaacuccaccuaccgagucgucucaguacuaacaguccuccaccaagacuggcucaacggaaaagaauacaaaugcaaagucuccaacaaagcacuaccugccccaaucgagaaaacaaucuccaaagccaaaggacaaccccgugaaccccagguauacacccuacccccaucacgcgacgaacucaccaaaaaucaggucagccuaaccugccucgucaaaggauucuaccccuccgacaucgccgucgaaugggaaagcaacggccaacccgaaaacaacuacaaaaccaccccacccguacucgacuccgacggcuccuucuuccucuacuccaagcucaccgucgacaaaucccgcuggcaacagggaaacguauucuccugcuccgucaugcacgaagcccuccacaaccacuauacccaaaaaucacucucccuaucacccggaaaauaaggacuaguuauaagacugacuagcccgaugggccucccaacgggcccuccuccccuccuugcaccgagauuaauaaaaaaaaaaaaaaaaaaaaaaaaaaaaaaaaaaaaaaaaaaaaaaaaaaaaaaaaaaaaaaaaugcaucccccccccccccccccccccccccccccccaaaggcucuuuucagagccaccagaauu

SEQ ID NO: 868 - RNA, 1621 nt, Artificial Sequence
  Ipilimumab HC with signale peptide
gggagaaagcuuaccauggaacuaggccuaucauggaucuuccuccucgccauccucaaaggcguccaaugccagguccaacucgucgaauccggcggaggcgucguccaacccggccgaucacuccgccucuccugcgccgccuccggcuucacuuucuccuccuacacaaugcacuggguacgccaagccccaggaaaaggacucgaaugggucaccuucaucuccuacgacggaaacaacaaauacuacgccgacagcguuaaaggacgauucacaaucucccgcgacaacucuaaaaacacccuauaccuccaaaugaacucccuccgcgccgaagacacagcaaucuacuacugcgccagaaccggauggcuaggccccuucgacuacuggggccaaggaacccucgucacaguauccuccgccuccaccaaaggcccuuccguauuuccccuggcccccucauccaaauccaccagcggcggaaccgccgcacuuggcugccucguaaaagacuacuuccccgaacccguaaccgucuccuggaacagcggcgcccuaacgucaggcguacacaccuuccccgcaguccuccaauccuccggacuauauagccucuccagcguaguaacaguacccuccagcucucucggcacacaaaccuauaucugcaacguaaaccacaaacccagcaacaccaaaguugacaaacgcguugaacccaaauccugcgacaaaacccacacaugcccacccugccccgcccccgaacuccucggcggucccucagucuuccucuucccaccaaaaccuaaagacacucuaaugauaucccgcaccccagaagugaccugcgucguagucgacgucucccacgaagaccccgaagucaaauucaacugguacgucgacggcgucgaaguacacaacgccaaaaccaaaccccgagaagaacaauacaacucaaccuacagagucgucagcguccucaccguccuccaucaggacuggcucaacggaaaagaauacaaaugcaaagucuccaacaaagcccuaccagcacccauagagaaaaccaucuccaaagccaagggccaaccacgcgaaccccaaguauacacacucccacccucacgagacgaacucaccaagaaccaaguaucuuuaaccugccuugucaaaggcuucuaccccuccgacaucgccguggaaugggaauccaacggacaacccgaaaacaacuacaagaccacaccacccguccuugacucagacggcuccuucuuccucuauuccaaacuuaccgucgacaaaucccgauggcaacaaggcaacgucuucuccugcucaguaaugcacgaagcccuacacaaccacuacacgcaaaaaucacucucccugucccccggaaaaugaggacuaguuauaagacugacuagcccgaugggccucccaacgggcccuccuccccuccuugcaccgagauuaauaaaaaaaaaaaaaaaaaaaaaaaaaaaaaaaaaaaaaaaaaaaaaaaaaaaaaaaaaaaaaaaaugcaucccccccccccccccccccccccccccccccaaaggcucuuuucagagccaccagaauu

SEQ ID NO: 869 - RNA, 1621 nt, Artificial Sequence
  Ipilimumab HC with signale peptide
gggagaaagcuuaccauggaacuuggccuuuccuggaucuuccuccucgccauacucaaaggcguccaaugccaaguucagcuagucgaauccgguggcggcguaguccaacccggacgcagccuccgacuauccugcgccgccuccggauucaccuucuccucauacaccaugcacuggguccgccaagcccccggcaaaggccucgaaugggucacauucaucuccuacgauggaaacaacaaauacuacgccgacucagucaaaggccgcuucacaaucucccgagacaacuccaaaaacacccuauaccuccaaaugaacucacuuagagccgaagacacagcaauauacuacugcgcccgcaccggauggcuaggacccuucgacuacuggggccaagggacccucgucaccguuagcuccgccuccacaaaaggacccuccguauucccccucgccccauccuccaaauccacaucuggcggcaccgccgcacucggaugccucguaaaagacuacuuccccgaacccgucacagucagcuggaacucaggcgcucucaccuccggcguccacacauucccggcaguccugcaaagcagcggccucuacucccuaucaucuguagucaccgucccauccucuucccucggcacccaaaccuacaucugcaacguaaaccacaaacccagcaacaccaaaguggauaaacgaguagaacccaaaucuugcgacaaaacccacacuugcccacccugccccgccccagaacuucuaggcggacccuccgucuuccucuucccacccaaacccaaagacacccucaugaucucacgcacccccgagguaaccugcguugucgucgacgugucccacgaagacccugaagucaaguucaacugguacgucgacggcgucgaagugcacaacgccaaaacaaaaccacgcgaagaacaauauaacucaaccuaccgcguagucuccguccuaaccguccuccaccaagacuggcuaaacggcaaagaauacaaauguaaaguauccaauaaagcacuccccgcccccauagagaaaacgaucuccaaggccaaaggucaaccacgcgaaccccaaguauacacccuaccaccaucccgcgacgaacucaccaaaaaccaaguaucccuaaccugccuagucaaaggcuucuaccccuccgacaucgcaguagaaugggaauccaacggccaaccagaaaacaacuacaagacaacaccucccguccucgacuccgacggauccuucuucuuauacucaaaacuaaccgucgacaaaucuagauggcaacaaggcaacgucuucucaugcuccguaaugcacgaagcucuccacaaccacuacacccaaaaaucacucucccucucccccggcaaaugaggacuaguuauaagacugacuagcccgaugggccucccaacgggcccuccuccccuccuugcaccgagauuaauaaaaaaaaaaaaaaaaaaaaaaaaaaaaaaaaaaaaaaaaaaaaaaaaaaaaaaaaaaaaaaaaugcaucccccccccccccccccccccccccccccccaaaggcucuuuucagagccaccagaauu

SEQ ID NO: 870 - RNA, 1621 nt, Artificial Sequence
  Ipilimumab HC with signale peptide
gggagaaagcuuaccauggaacuaggacucucauggauauuuuuacuagccauacucaaaggcguccaaugucaaguacaacuaguagaaucaggcggaggaguuguccaacccggccgaucccuccgcuuaucaugugcagcaucuggauucacauuuucaucauacacaaugcacugggucagacaagccccaggaaaagguuuagaauggguaacauuuauaucauacgacgguaacaacaaauacuaugcagacucaguaaaaggaagauuuacaaucagcagagacaauagcaaaaacacacuauaccuacaaaugaacucccuacgagcagaagacacagccaucuauuacugugcacgaacaggauggcuaggaccauucgauuacuggggccaaggaacauuagucaccguaucuucugcauccacaaaagguccuucaguauuuccauuagcacccagcuccaaaucuacaucuggcggaacagccgccuuaggaugcuuaguuaaagauuacuuuccagaaccaguaacaguuucauggaacucaggagcucuaacaucuggaguacacacauuuccagcaguccuacaaucauccggacuauauucacuaucaucaguaguaacuguccccucaucaucauuaggcacacaaacuuauauuugcaauguaaaccauaaaccaucaaauacaaaagucgacaaaagaguagaaccaaaaucaugcgacaaaacccacacauguccacccugccccgccccagaauuauuaggaggaccaucugucuuccuuuucccaccaaaaccaaaagacaccuuaaugauaucucgaacuccagaaguaacauguguaguuguagauguuucacaugaagacccagaaguaaaauucaacugguacgucgacggaguagaaguacacaaugcaaaaacaaaaccccgagaagaacaauacaacuccacauacagaguagucucaguacuaacaguacuccaucaagacuggcuaaacggaaaagaauacaaauguaaaguaaguaauaaagcacuacccgcaccaauagaaaaaacaauaucaaaagcaaaaggacaaccaagagaaccacaaguauauacacuaccuccauccagagaugaauuaacaaaaaaccaaguaagucuaacauguuuaguaaaaggauucuaucccagcgacauagcagucgaaugggaaucaaauggacaaccagaaaacaacuauaaaaccacaccaccaguauuagauucagacggaucauuuuuccuuuacucaaaauuaacaguagacaaauccagauggcaacaaggcaaugucuuuucaugcucugucaugcacgaagcucuacauaaucacuacacucaaaaaucacuaucacucucaccaggcaaaugaggacuaguuauaagacugacuagcccgaugggccucccaacgggcccuccuccccuccuugcaccgagauuaauaaaaaaaaaaaaaaaaaaaaaaaaaaaaaaaaaaaaaaaaaaaaaaaaaaaaaaaaaaaaaaaaugcaucccccccccccccccccccccccccccccccaaaggcucuuuucagagccaccagaauu

SEQ ID NO: 871 - RNA, 1621 nt, Artificial Sequence
  Ipilimumab HC with signale peptide
gggagaaagcuuaccauggaacuaggacuauccuggauauuucuacuagccauccuaaaaggaguacaaugucaaguacaauuaguagaauccggaggcggaguaguccaacccggaagaucacuaagacucaguugugcagcaucaggauucacauuuucaucauauacaaugcacuggguuagacaagcacccggaaaaggacucgaauggguaaccuuuaucuccuacgauggaaacaauaaauauuacgcagauucuguaaaaggccgauucacaauaucaagagacaacucuaaaaauacauuauaccuacaaaugaacucuuuaagagcagaagacacagcaauauauuacugugcaagaacaggauggcucggaccauucgacuauuggggacaaggaaccuuaguaacaguauccagcgcuagcacaaaaggcccuucugucuucccauuagcaccauccucaaaaucaacuucuggcggaacagcagcucuaggaugcuuaguaaaagauuauuuuccagaaccaguuacuguauccuggaacucaggagcacuaaccaguggaguucacacauuuccagccguauuacaaucauccggauuauauucauuaucauccgucguaaccguaccaagcucaucauuaggaacacaaacauacauaugcaacguaaaucacaaaccauccaauacaaaaguagauaaaagaguagaaccuaaauccugugauaaaacacacacaugcccaccaugcccagcaccagaauuacuaggaggaccaucaguauuccuauucccaccaaaaccaaaagauacacuaaugauaucaagaacaccagaaguaacuuguguagucguagacgucucacaugaagacccagaaguaaaauuuaauugguauguugacggagucgaaguacacaacgccaaaacaaaaccacgagaagaacaauacaacucaacauauagaguaguaucuguauuaacaguauuacaucaagauugguuaaacggaaaagaauacaaauguaaaguaucaaauaaagcucuaccagcaccaauagaaaagacaaucucaaaagcaaaaggccaaccucgagaaccacaaguauacacacuaccaccaucaagagacgaauuaaccaaaaaccaagucucauuaacaugcuuaguuaaagguuucuaccccagcgacaucgcaguugaaugggaaucaaacggucaaccugaaaacaacuauaaaacaacaccaccaguuuuagacucagauggauccuuuuucuuauacucaaaauuaacaguugacaaaucaagauggcaacaaggaaaugucuuuucauguuccgucaugcaugaagcacuacacaaccauuacacccaaaaaucacucucacuaucacccgguaaauaaggacuaguuauaagacugacuagcccgaugggccucccaacgggcccuccuccccuccuugcaccgagauuaauaaaaaaaaaaaaaaaaaaaaaaaaaaaaaaaaaaaaaaaaaaaaaaaaaaaaaaaaaaaaaaaaugcaucccccccccccccccccccccccccccccccaaaggcucuuuucagagccaccagaauu

SEQ ID NO: 872 - RNA, 1621 nt, Artificial Sequence
  Ipilimumab backbone Rituximab HC with signale peptide
gggagaaagcuuaccauggagcugggccucagcuggaucuuccugcuggccauccucaagggggugcagugccaggugcagcuggucgagagcggcgggggcguggugcagcccgggcgcucccuccggcugagcugcgccgccuccggcuucaccuucagcuccuacaccaugcacuggguccgccaggcgccggggaagggccuggagugggugacguucaucagcuacgacggcaacaacaaguacuacgccgacuccgugaaggggcgguucaccaucagccgcgacaacuccaagaacacccucuaccugcagaugaacagccugcgggccgaggacaccgccaucuacuacugcgcccgcacgggcuggcucgggcccuucgacuacuggggccaggggacccuggucaccguguccagcgcguccaccaagggccccagcguguucccccuggccccguccagcaaguccacgagcggcgggaccgccgcccucggcugccuggucaaggacuacuuccccgagcccgugaccguguccuggaacagcggggcgcugaccagcggcguccacacguuccccgccgugcuccaguccagcggccuguacucccugagcuccguggucaccgugccgagcuccagccucgggacccagaccuacaucugcaacgugaaccacaagcccuccaacacgaaggucgacaagcggguggagcccaagagcugcgacaagacccacacgugcccgcccugccccgcccccgagcugcugggcggcccgagcguguuccucuucccgcccaagcccaaggacacccugaugaucagccgcacccccgaggucacgugcgugguggucgacgugagccacgaggaccccgaggugaaguucaacugguacgucgacgggguggaggugcacaacgccaagaccaagccccgggaggagcaguacaacagcaccuaccgcgucgugagcgugcugaccguccuccaccaggacuggcugaacggcaaggaguacaagugcaaggugucgaacaaggcccugccggcccccaucgagaagacgaucagcaaggcgaagggccagccgcgggagccccaggucuacacccucccgcccagccgcgacgagcugaccaagaaccaggugucccugacgugccucgugaagggcuucuaccccagcgacaucgccgucgagugggagagcaacgggcagcccgagaacaacuacaagaccacgcccccggugcuggacuccgacggcagcuucuuccuguacuccaagcucaccguggacaagagccgguggcagcaggggaacgucuucuccugcagcgugaugcacgaggcccugcacaaccacuacacccagaagucccugagccucucccccggcaagugaggacuaguuauaagacugacuagcccgaugggccucccaacgggcccuccuccccuccuugcaccgagauuaauaaaaaaaaaaaaaaaaaaaaaaaaaaaaaaaaaaaaaaaaaaaaaaaaaaaaaaaaaaaaaaaaugcaucccccccccccccccccccccccccccccccaaaggcucuuuucagagccaccagaauu

SEQ ID NO: 873 - RNA, 1621 nt, Artificial Sequence
  Ipilimumab backbone Rituximab HC with signale peptide
gggagaaagcuuaccauggagcugggccucagcuggaucuuccuucuggccauuuugaagggggugcagugccaaguccaguuaguugaauccggagguggcgugguacagcccgggagaucucugaggcuaucaugugcugcaaguggauuuaccuucagcuccuacacaaugcacugggugcggcaggccccuggcaaaggucucgagugggucacuuuuauaucuuaugacgggaacaauaaguacuaugcggauucggugaaaggacgcuucacgaucucacgagacaacagcaagaauacccuguaccuucaaaugaacagucugcgugcugaagauacagccauuuauuacugcgcaagaacuggcugguugggcccauuugacuauugggggcagggaacccucguuacaguguccucugccagcaccaaagguccguccgucuucccccuggcuccuucaaguaagagcacuucuggcgggacagcagcccugggaugucucgugaaggauuacuuuccagagcccguaaccguuuccuggaacucaggcgcuuuaacgagcggugugcauacuuucccugccguccugcagaguucugggcuuuacuccuugagcucgguggugaccgucccaucuuccucacugggaacacagacuuauaucugcaauguuaaucacaaacccaguaacaccaagguggacaaaaggguagaaccuaagagcugugauaaaacacauaccugcccaccgugucccgcccccgagcugcugggcggcccgagcguguuccucuucccgcccaagcccaaggacacccugaugaucagccgcacccccgaggucacgugcgugguggucgacgugagccacgaggaccccgaggugaaguucaacugguacgucgacgggguggaggugcacaacgccaagaccaagccccgggaggagcaguacaacagcaccuaccgcgucgugagcgugcugaccguccuccaccaggacuggcugaacggcaaggaguacaagugcaaggugucgaacaaggcccugccggcccccaucgagaagacgaucagcaaggcgaagggucagccuagggaaccccagguguacacguuaccacccucucgggaugagcugaccaagaaccaaguaucacucacaugccuugucaaaggcuucuauccuagugacaucgcaguggaaugggagagcaaugggcagccagagaacaacuacaagacuaccccgcccguucuggacuccgauggaucuuucuucuuguacucgaaacuaacaguggacaagagccgcuggcagcaaggcaaugucuucuccuguucagugaugcacgaagcucugcauaaccacuauacucagaagagucucucucugagcccugguaaaugaggacuaguuauaagacugacuagcccgaugggccucccaacgggcccuccuccccuccuugcaccgagauuaauaaaaaaaaaaaaaaaaaaaaaaaaaaaaaaaaaaaaaaaaaaaaaaaaaaaaaaaaaaaaaaaaugcaucccccccccccccccccccccccccccccccaaaggcucuuuucagagccaccagaauu

SEQ ID NO: 874 - RNA, 1621 nt, Artificial Sequence
  Ipilimumab backbone Rituximab HC with signale peptide
gggagaaagcuuaccauggagcugggccugagcuggaucuuccugcuggccauccugaagggcgugcagugccaggugcagcugguggagagcggcggcggcguggugcagcccggcagaagccugagacugagcugcgccgccagcggcuucaccuucagcagcuacaccaugcacugggugagacaggcccccggcaagggccuggagugggugaccuucaucagcuacgacggcaacaacaaguacuacgccgacagcgugaagggcagauucaccaucagcagagacaacagcaagaacacccuguaccugcagaugaacagccugagagccgaggacaccgccaucuacuacugcgccagaaccggcuggcugggccccuucgacuacuggggccagggcacccuggugaccgugagcagcgccagcaccaagggccccagcguguucccccuggcccccagcagcaagagcaccagcggcggcaccgccgcccugggcugccuggugaaggacuacuuccccgagcccgugaccgugagcuggaacagcggcgcccugaccagcggcgugcacaccuuccccgccgugcugcagagcagcggccuguacagccugagcagcguggugaccgugcccagcagcagccugggcacccagaccuacaucugcaacgugaaccacaagcccagcaacaccaagguggacaagagaguggagcccaagagcugcgacaagacccacaccugcccccccugccccgcccccgagcugcugggcggcccgagcguguuccucuucccgcccaagcccaaggacacccugaugaucagccgcacccccgaggucacgugcgugguggucgacgugagccacgaggaccccgaggugaaguucaacugguacgucgacgggguggaggugcacaacgccaagaccaagccccgggaggagcaguacaacagcaccuaccgcgucgugagcgugcugaccguccuccaccaggacuggcugaacggcaaggaguacaagugcaaggugucgaacaaggcccugccggcccccaucgagaagacgaucagcaaggcgaagggccagcccagagagccccagguguacacccugccccccagcagagacgagcugaccaagaaccaggugagccugaccugccuggugaagggcuucuaccccagcgacaucgccguggagugggagagcaacggccagcccgagaacaacuacaagaccaccccccccgugcuggacagcgacggcagcuucuuccuguacagcaagcugaccguggacaagagcagauggcagcagggcaacguguucagcugcagcgugaugcacgaggcccugcacaaccacuacacccagaagagccugagccugagccccggcaagugaggacuaguuauaagacugacuagcccgaugggccucccaacgggcccuccuccccuccuugcaccgagauuaauaaaaaaaaaaaaaaaaaaaaaaaaaaaaaaaaaaaaaaaaaaaaaaaaaaaaaaaaaaaaaaaaugcaucccccccccccccccccccccccccccccccaaaggcucuuuucagagccaccagaauu

SEQ ID NO: 875 - RNA, 1564 nt, Artificial Sequence
  Ipilimumab HC without signale peptide
gggagaaagcuuacccaggugcagcuggucgagagcggcgggggcguggugcagcccgggcgcucccuccggcugagcugcgccgccuccggcuucaccuucagcuccuacaccaugcacuggguccgccaggcgccggggaagggccuggagugggugacguucaucagcuacgacggcaacaacaaguacuacgccgacuccgugaaggggcgguucaccaucagccgcgacaacuccaagaacacccucuaccugcagaugaacagccugcgggccgaggacaccgccaucuacuacugcgcccgcacgggcuggcucgggcccuucgacuacuggggccaggggacccuggucaccguguccagcgcguccaccaagggccccagcguguucccccuggccccguccagcaaguccacgagcggcgggaccgccgcccucggcugccuggucaaggacuacuuccccgagcccgugaccguguccuggaacagcggggcgcugaccagcggcguccacacguuccccgccgugcuccaguccagcggccuguacucccugagcuccguggucaccgugccgagcuccagccucgggacccagaccuacaucugcaacgugaaccacaagcccuccaacacgaaggucgacaagcggguggagcccaagagcugcgacaagacccacacgugcccgcccugccccgcccccgagcugcugggcgggcccuccguguuccucuucccgcccaagcccaaggacacccugaugaucagccgcacccccgaggugaccugcgucguggucgacgugucccacgaggacccggaggucaaguucaacugguacguggacggcguggagguccacaacgccaagaccaagccccgggaggagcaguacaacagcaccuaccgcgugguguccguccugacggugcuccaccaggacuggcugaacgggaaggaguacaagugcaaggugagcaacaaggcccugcccgcgcccaucgagaagaccaucuccaaggccaagggccagccgcgggagccccaggucuacacccucccgcccagccgcgacgagcugaccaagaaccaggugucccugacgugccucgugaagggcuucuaccccagcgacaucgccgucgagugggagagcaacgggcagcccgagaacaacuacaagaccacgcccccggugcuggacuccgacggcagcuucuuccuguacuccaagcucaccguggacaagagccgguggcagcaggggaacgucuucuccugcagcgugaugcacgaggcccugcacaaccacuacacccagaagucccugagccucucccccggcaagugaggacuaguuauaagacugacuagcccgaugggccucccaacgggcccuccuccccuccuugcaccgagauuaauaaaaaaaaaaaaaaaaaaaaaaaaaaaaaaaaaaaaaaaaaaaaaaaaaaaaaaaaaaaaaaaaugcaucccccccccccccccccccccccccccccccaaaggcucuuuucagagccaccagaauu

SEQ ID NO: 876 - RNA, 1564 nt, Artificial Sequence
  Ipilimumab HC without signale peptide
gggagaaagcuuacccagguccagcucgucgaguccggcggcggcgucguccagcccggccgcucccuccgccucuccugcgccgccuccggcuucaccuucuccuccuacaccaugcacuggguccgccaggcccccggcaagggccucgagugggucaccuucaucuccuacgacggcaacaacaaguacuacgccgacuccgucaagggccgcuucaccaucucccgcgacaacuccaagaacacccucuaccuccagaugaacucccuccgcgccgaggacaccgccaucuacuacugcgcccgcaccggcuggcucggccccuucgacuacuggggccagggcacccucgucaccgucuccuccgccuccaccaagggccccuccgucuucccccucgcccccuccuccaaguccaccuccggcggcaccgccgcccucggcugccucgucaaggacuacuuccccgagcccgucaccgucuccuggaacuccggcgcccucaccuccggcguccacaccuuccccgccguccuccaguccuccggccucuacucccucuccuccgucgucaccguccccuccuccucccucggcacccagaccuacaucugcaacgucaaccacaagcccuccaacaccaaggucgacaagcgcgucgagcccaaguccugcgacaagacccacaccugcccccccugccccgcccccgagcuccucggcggccccuccgucuuccucuucccccccaagcccaaggacacccucaugaucucccgcacccccgaggucaccugcgucgucgucgacgucucccacgaggaccccgaggucaaguucaacugguacgucgacggcgucgagguccacaacgccaagaccaagccccgcgaggagcaguacaacuccaccuaccgcgucgucuccguccucaccguccuccaccaggacuggcucaacggcaaggaguacaagugcaaggucuccaacaaggcccuccccgcccccaucgagaagaccaucuccaaggccaagggccagccccgcgagccccaggucuacacccucccccccucccgcgacgagcucaccaagaaccaggucucccucaccugccucgucaagggcuucuaccccuccgacaucgccgucgagugggaguccaacggccagcccgagaacaacuacaagaccaccccccccguccucgacuccgacggcuccuucuuccucuacuccaagcucaccgucgacaagucccgcuggcagcagggcaacgucuucuccugcuccgucaugcacgaggcccuccacaaccacuacacccagaagucccucucccucucccccggcaagugaggacuaguuauaagacugacuagcccgaugggccucccaacgggcccuccuccccuccuugcaccgagauuaauaaaaaaaaaaaaaaaaaaaaaaaaaaaaaaaaaaaaaaaaaaaaaaaaaaaaaaaaaaaaaaaaugcaucccccccccccccccccccccccccccccccaaaggcucuuuucagagccaccagaauu

SEQ ID NO: 877 - RNA, 1564 nt, Artificial Sequence
  Ipilimumab HC without signale peptide
gggagaaagcuuacccaggugcaacuggucgagagcggcgggggaguugugcagcccgguagaucccucaggcuuucuugcgccgcuucaggcuucaccuuuaguagcuacacaaugcacuggguacggcaggcaccugggaagggacuggaaugggugacuuucaucuccuaugacggcaacaauaaauacuaugccgauucugucaagggucgcuuuacgauuucgcgagacaacagcaaaaauaccuuguacuuacagaugaacucacugcgugcggaggauacagcuauauauuacugugccagaacuggguggcuaggaccauucgacuauuggggccaaggcacccucgugacaguuaguuccgcaucuaccaaggggccgagcguguuuccccuggccccuuccucaaaaaguacuagcggagguacagcugcacuuggcugccuggucaaggauuacuucccagaacccgugaccguaucuuggaacuccggggccuugacgucaggaguucauacuuuuccugcugugcuccagagcaguggccuguacucucuguccagcgucgugaccgugccaucgucuucccucgguacacagacuuauaucuguaaugucaaucacaagcccucaaacaccaaaguugacaagaggguggagccuaaaaguugcgauaagacacauaccuguccaccgugccccgccccugaauuacuugggggaccaagcguauuccuguuucccccuaaaccaaaggacacguugaugauuucccggacucccgaggugacaugugucgugguugaugugucucacgaggacccggaagucaaguucaauugguacguggauggcguagagguucauaacgcgaaaaccaagccucgcgaagaacaguauaauagcacuuacagaguggucucagugcugacaguccuacaccaagacuggcucaacggcaaagaguauaagugcaaagugaguaauaaggcacugcccgccccaaucgagaaaaccauuuccaaggcuaaggggcagccuagggagccccagguuuacacgcuuccacccagccgggaugaacugaccaaaaaccaggugucuuugacaugucucguaaagggauuuuauccuucagacaucgccgucgagugggaaaguaauggucaaccagagaacaacuacaaaacuaccccgcccgugcuggacagcgauggcuccuucuuuuuauacucuaagcugacaguugacaaaucgcgcuggcagcaggggaauguguucagcugcuccgucaugcacgaggcacuccauaaccacuauacucaaaagucacuuagucugucuccuggaaagugaggacuaguuauaagacugacuagcccgaugggccucccaacgggcccuccuccccuccuugcaccgagauuaauaaaaaaaaaaaaaaaaaaaaaaaaaaaaaaaaaaaaaaaaaaaaaaaaaaaaaaaaaaaaaaaaugcaucccccccccccccccccccccccccccccccaaaggcucuuuucagagccaccagaauu

SEQ ID NO: 878 - RNA, 1564 nt, Artificial Sequence
  Ipilimumab HC without signale peptide
gggagaaagcuuacccaggugcagcugguggagagcggcggcggcguggugcagcccggcagaagccugagacugagcugcgccgccagcggcuucaccuucagcagcuacaccaugcacugggugagacaggcccccggcaagggccuggagugggugaccuucaucagcuacgacggcaacaacaaguacuacgccgacagcgugaagggcagauucaccaucagcagagacaacagcaagaacacccuguaccugcagaugaacagccugagagccgaggacaccgccaucuacuacugcgccagaaccggcuggcugggccccuucgacuacuggggccagggcacccuggugaccgugagcagcgccagcaccaagggccccagcguguucccccuggcccccagcagcaagagcaccagcggcggcaccgccgcccugggcugccuggugaaggacuacuuccccgagcccgugaccgugagcuggaacagcggcgcccugaccagcggcgugcacaccuuccccgccgugcugcagagcagcggccuguacagccugagcagcguggugaccgugcccagcagcagccugggcacccagaccuacaucugcaacgugaaccacaagcccagcaacaccaagguggacaagagaguggagcccaagagcugcgacaagacccacaccugcccccccugccccgcccccgagcugcugggcggccccagcguguuccuguucccccccaagcccaaggacacccugaugaucagcagaacccccgaggugaccugcguggugguggacgugagccacgaggaccccgaggugaaguucaacugguacguggacggcguggaggugcacaacgccaagaccaagcccagagaggagcaguacaacagcaccuacagaguggugagcgugcugaccgugcugcaccaggacuggcugaacggcaaggaguacaagugcaaggugagcaacaaggcccugcccgcccccaucgagaagaccaucagcaaggccaagggccagcccagagagccccagguguacacccugccccccagcagagacgagcugaccaagaaccaggugagccugaccugccuggugaagggcuucuaccccagcgacaucgccguggagugggagagcaacggccagcccgagaacaacuacaagaccaccccccccgugcuggacagcgacggcagcuucuuccuguacagcaagcugaccguggacaagagcagauggcagcagggcaacguguucagcugcagcgugaugcacgaggcccugcacaaccacuacacccagaagagccugagccugagccccggcaagugaggacuaguuauaagacugacuagcccgaugggccucccaacgggcccuccuccccuccuugcaccgagauuaauaaaaaaaaaaaaaaaaaaaaaaaaaaaaaaaaaaaaaaaaaaaaaaaaaaaaaaaaaaaaaaaaugcaucccccccccccccccccccccccccccccccaaaggcucuuuucagagccaccagaauu

SEQ ID NO: 879 - RNA, 1564 nt, Artificial Sequence
  Ipilimumab HC without signale peptide
gggagaaagcuuacccaggugcaacuggucgagagcggcgggggaguugugcagcccggcagaucccuccggcugucuugcgccgcuagcggguucaccuuuuccucuuacacaaugcacugggugcgccaggccccuggaaagggccuugaaugggucacguucaucagcuaugacgggaacaauaaauacuaugcggauuccgugaagggaagauuuaccauuucucgggacaacagcaaaaauacacuguaccuccagaugaacucccugcgcgcugaggauaccgccaucuauuacugugccagaacaggcuggcuuggcccguucgacuauugggggcaaggaacccugguuacagugagcucugcuuccaccaagggccccagcgucuuuccucucgcccccucuuccaaaagcacgucugggggaaccgcugcccugggcugccuggugaaggauuacuucccugaacccguuacaguguccuggaauagcggggcgcucaccuccggaguccauacauuuccugccgugcugcagucuagcggccuuuacucccugagcucuguggucaccguuccguccagcucucucggcacgcagacauauauuuguaacgugaaucacaagcccagcaacaccaaaguggacaagcgggucgagccuaaauccugcgauaagacacauaccugucccccuugccccgcuccggaacugcuugggggaccuucuguguuccuguuucccccuaaacccaaggacacccucaugaucagccgcacacccgagguuacguguguggucguggauguuucccacgaggacccugaagugaaguucaauugguacgucgauggcguggagguccauaacgccaaaaccaagccgagagaagaacaguauaauagcacauaccgggugguuucugugcugaccguccugcaccaagacuggcucaacgggaaagaguauaagugcaaaguguccaauaaggcucugcccgccccuauugagaaaacaaucagcaaggcgaagggacagccccgcgagccucagguuuacacccuucccccgucuagagaugaacugacgaaaaaccaggugucccucacaugucuggucaagggcuuuuauccuagcgacaucgccguggagugggaauccaaugggcaacccgagaacaacuacaaaaccaccccucccgugcuugacucugauggcagcuucuuucuguacuccaagcucacaguugacaaaucucgguggcagcagggaaaugucuucagcugcuccgugaugcacgaggcucugcauaaccacuauacccaaaagagccugucucucuccccuggcaagugaggacuaguuauaagacugacuagcccgaugggccucccaacgggcccuccuccccuccuugcaccgagauuaauaaaaaaaaaaaaaaaaaaaaaaaaaaaaaaaaaaaaaaaaaaaaaaaaaaaaaaaaaaaaaaaaugcaucccccccccccccccccccccccccccccccaaaggcucuuuucagagccaccagaauu

SEQ ID NO: 880 - RNA, 1564 nt, Artificial Sequence
  Ipilimumab HC without signale peptide
gggagaaagcuuacccaaguucaacuaguagaaucaggaggaggagucguccaaccaggcagaucacuaagacuaucaugugcagccucuggcuucacauucucuucuuauacaaugcacuggguaagacaagcaccaggaaaaggacuagaauggguaacauucauaucuuacgacggaaauaacaaauauuacgcugauucuguaaaagguagauucacaauuucuagagacaauaguaaaaauacauuauaccuccaaaugaauagucuuagagcagaagauacagcaauauacuauugugcacgaacaggaugguuaggaccauucgauuacuggggucaaggaacauuaguaacaguaucaucugcaucaacaaaagguccuucaguauucccacucgcaccaucaucaaaauccacaucaggaggaacugcagcccucggaugccuagucaaagacuacuucccagaaccaguaaccguaucuuggaacuccggagcauuaacaucuggaguacauacauucccugcaguacuccaaucaucaggacuauacucacuauccuccguaguaaccgucccuucaucaucucuagguacacaaacuuacauaugcaacguaaaucacaaaccaucuaauacaaaaguagacaaaagagucgaaccaaaaucaugcgacaaaacccacacaugccccccaugcccagcacccgaacuacucggaggaccaucaguauuucuauuuccaccaaaaccaaaagauacacuaaugauaucacgaacaccugaaguaaccuguguugucgucgacguaucgcacgaagacccagaaguaaaauuuaauugguacguagacgguguagaaguucacaaugcaaaaacaaaaccaagagaagaacaauacaacucaacauauagaguaguuucugucuuaaccgucuuacaccaagauugguuaaacgguaaagaauauaaaugcaaaguaucuaauaaagcucuacccgccccaaucgaaaaaacaauaucaaaagccaaaggccaaccucgagaaccacaaguauacacacuacccccuucaagagaugaacuaacaaaaaaccaaguaagccuaacaugccuaguaaaaggcuuuuauccaucagacauagcaguagaaugggaaucuaacggucaaccugaaaauaacuauaaaacaacaccaccaguacuagacucagauggaucauucuuucuauacucaaaauuaacaguagauaaaucaagauggcaacaaggaaacguuuuuucuuguucuguaaugcacgaagcacuacacaaucacuauacccaaaaaucucucagccuaucacccggaaaaugaggacuaguuauaagacugacuagcccgaugggccucccaacgggcccuccuccccuccuugcaccgagauuaauaaaaaaaaaaaaaaaaaaaaaaaaaaaaaaaaaaaaaaaaaaaaaaaaaaaaaaaaaaaaaaaaugcaucccccccccccccccccccccccccccccccaaaggcucuuuucagagccaccagaauu

SEQ ID NO: 881 - RNA, 1564 nt, Artificial Sequence
  Ipilimumab HC without signale peptide
gggagaaagcuuacccaggugcaacuggucgagagcggcgggggugugguacagcccggcaggucccuccggcugaguugcgccgcaagcggguucaccuuuuccaguuacacuaugcacugggugcgccaggccccaggcaaggguuuggaaugggucaccuucaucagcuaugacgggaacaauaaauacuaugcggauuccgugaagggcagguuuacgauuagccgggacaacuccaaaaauacucuguaccuccagaugaacagucugcgcgccgaggauaccgcaaucuauuacugugccaggaccggcugguuggggccguucgacuauuggggucaaggcacucuggugaccgucagcuccgcaagcacgaaggggcccaguguguuuccacucgcccccuccagcaaauccaccaguggcgguaccgcggcccuggggugccugguaaaggauuacuucccagaacccgugacugucagcuggaacuccggcgcacucaccagcggcgugcauaccuuuccagccgugcugcagaguuccggguuguacagccugaguuccgucgugacgguaccgagcagcucccucgguacucagaccuauauuuguaaugugaaucacaagcccaguaacacuaaagucgacaagcggguggagccaaaaagcugcgauaagacccauaccugucccccaugccccgccccggaacugcugggcgggcccuccguguucuuguuuccacccaaaccaaaggacacucucaugaucagccgcacgcccgaggucaccugugugguaguggaugucagucacgaggacccagaagugaaauucaauugguacgucgauggcguggaggugcauaacgcaaagacuaagccgagggaagaacaguauaauuccaccuaccggguagugagcguccugaccgugcugcaccaagacuggcucaacgguaaagaguauaagugcaaagucuccaauaaggcccugcccgcgccaauugagaaaacuaucaguaaggccaagggccagccccgcgagccacagguguacacguugcccccgagcagggaugaacugaccaaaaaccaggugucccucacuugucugguaaagggguuuuauccaagcgacaucgcaguggagugggaaaguaauggccaacccgagaacaacuacaaaaccacucccccaguccuggacuccgaugggagcuucuucuuguacuccaagcucacuguggacaaaagucgguggcagcaggguaaugucuuuagcugcuccgugaugcacgaggcccugcauaaccacuauacgcaaaagagccugagucucucccccggcaagugaggacuaguuauaagacugacuagcccgaugggccucccaacgggcccuccuccccuccuugcaccgagauuaauaaaaaaaaaaaaaaaaaaaaaaaaaaaaaaaaaaaaaaaaaaaaaaaaaaaaaaaaaaaaaaaaugcaucccccccccccccccccccccccccccccccaaaggcucuuuucagagccaccagaauu

SEQ ID NO: 882 - RNA, 1564 nt, Artificial Sequence
  Ipilimumab HC without signale peptide
gggagaaagcuuacccaaguccagcuaguagaauccggcggaggcgucguccaaccaggacgcucgcuaagacucagcugcgccgcaucuggcuucacauucagcucauacacaaugcacugggucagacaagcuccaggcaaaggccucgaaugggucacauucauaucauacgacggcaacaacaaauacuacgccgacuccguaaaaggccgcuucaccaucuccagagacaacuccaaaaacacccuauaccuccaaaugaacucacucagagccgaagacaccgcaaucuacuacugcgcaagaaccggcuggcuuggccccuucgauuacuggggacaaggcacccucgucaccgucucauccgcauccaccaaaggcccauccgucuucccccucgcaccaucauccaaauccaccagcggagguaccgccgcacucggcugccuagucaaagacuacuuccccgaaccugucacagucuccuggaacuccggagcccugacaucgggcguccacacauuccccgccguccuacaaagcuccggccucuacagccucuccucagucgucaccguacccuccuccagccucggaacacaaaccuacaucugcaacguuaaccacaaaccuuccaacaccaaagucgacaaacgagucgaacccaaaucgugcgacaaaacccauaccugcccacccugccccgcccccgaacuccucggcggcccauccgucuuccuauucccacccaaaccaaaggacacacucaugauaucacgaaccccugaagucacgugcgucgucgucgacguuucacacgaagaccccgaagucaaauucaacugguacguagacggagucgaaguccacaacgccaaaaccaaaccccgagaagaacaauacaacucuaccuaccgcgucguauccguccucaccguccuccaccaagacuggcuaaacggcaaagaauacaagugcaaaguuucgaacaaagcccuccccgcacccaucgagaaaaccaucuccaaagccaaaggacaaccccgcgaaccccaaguguacacccucccacccucgcgugacgaacucaccaaaaaucaagucucucuaaccugccucguaaaaggcuucuaccccuccgacauagcaguagaaugggaaucuaacggccagcccgaaaacaacuacaaaacaaccccacccguacucgacuccgacggcucauucuuccucuacucaaaacucaccgucgauaaaucccgcuggcaacaaggcaaugucuucucaugcagcgucaugcacgaagcacuccacaaccacuacacacaaaagagccucucccuaucccccggcaaaugaggacuaguuauaagacugacuagcccgaugggccucccaacgggcccuccuccccuccuugcaccgagauuaauaaaaaaaaaaaaaaaaaaaaaaaaaaaaaaaaaaaaaaaaaaaaaaaaaaaaaaaaaaaaaaaaugcaucccccccccccccccccccccccccccccccaaaggcucuuuucagagccaccagaauu

SEQ ID NO: 883 - RNA, 1564 nt, Artificial Sequence
  Ipilimumab HC without signale peptide
gggagaaagcuuacccaaguccagcuagucgaaucaggcggaggcgucguccaacccggacggucccuacgacucagcugugcugccagcggcuucaccuucucguccuacacaaugcacuggguccggcaagcacccggcaaaggucucgaaugggucaccuucauauccuaugacggcaacaacaaauacuacgccgacuccgucaaaggccgcuucacaaucucaagagacaacuccaaaaacacccucuaccuccaaaugaacucgcuaagagcagaagacaccgccaucuacuacugcgcccgcaccggauggcucggccccuucgacuacuggggccaaggcacccuagucacaguaucauccgccucuacaaagggaccauccgucuucccccucgccccauccuccaaauccaccucuggaggcaccgccgcacucggaugccucgucaaagacuacuuccccgaacccgucacagucuccuggaacuccggcgcccuaaccuccggaguccacacauucccugcuguccuacaauccucgggccuauacucccucucaucuguagucaccguccccucauccucccuuggaacccaaacguacauaugcaacgucaaccacaaaccuuccaacacaaaagucgacaaacguguagagccaaaguccugugacaaaacacacacaugcccaccaugucccgcgcccgaacuacucggcggacccucagucuuccucuuucccccgaaacccaaagacacccucaugauaucacgcacccccgaaguuaccugcgucgucgucgacgucucccacgaagaccccgaagucaaauucaacugguacgucgacggcguagaaguccacaacgccaaaaccaaaccacgggaagaacaauacaacuccacauaccgcgucgucagcguacucaccguccuacaucaagacuggcuaaacggcaaagaauacaaaugcaaaguauccaacaaagcacucccagcaccaaucgagaaaacaaucucaaaagcaaaaggccaaccccgggaaccacaaguauauacccucccacccagcagagacgaacucaccaaaaaccaaguuucacucacaugccucguaaaaggauucuaccccucugacauugcugucgaaugggaauccaacggacaacccgaaaacaacuacaaaaccaccccgcccguccucgacuccgacggcucauucuuccuauacuccaaacucaccguagacaaaucccgauggcagcaaggcaacgucuucuccugcagcguaaugcacgaagcacuccacaaccacuauacccaaaaaucccucucccugucccccggaaaguaaggacuaguuauaagacugacuagcccgaugggccucccaacgggcccuccuccccuccuugcaccgagauuaauaaaaaaaaaaaaaaaaaaaaaaaaaaaaaaaaaaaaaaaaaaaaaaaaaaaaaaaaaaaaaaaaugcaucccccccccccccccccccccccccccccccaaaggcucuuuucagagccaccagaauu

SEQ ID NO: 884 - RNA, 1564 nt, Artificial Sequence
  Ipilimumab HC without signale peptide
gggagaaagcuuacccaaguacaacucgucgaauccggcggcggcguaguccaaccaggcagaucccuacgccucuccugcgccgcauccggauucaccuucuccuccuacaccaugcacuggguacgccaagcccccggcaagggccucgaaugggucacguucaucucuuacgacggcaacaacaaauacuacgccgacuccguaaaaggucguuucaccaucucccgcgacaacagcaaaaacacccuauaccuucaaaugaacucccuccgcgccgaagacaccgccaucuacuacugugcccgcaccgguuggcucggccccuucgacuacuggggucaaggaacccuaguuaccguaucauccgcaucuaccaaaggccccuccguauucccacuagccccaucguccaaaucaacaucaggcggcacagccgcccucggaugccuagucaaagacuacuuccccgaacccgucaccgucucauggaacuccggagcccuaaccucgggaguccacaccuucccagcgguacuacaaucauccggacuuuacucccuaucauccgucgucacaguaccauccucaucccucgggacccaaaccuacauaugcaacgucaaccacaaaccauccaacaccaaagucgacaaaagagucgaaccaaaauccugcgacaaaacccacacaugcccacccugcccagcccccgaacuccucggcggccccuccguauuccucuucccacccaaacccaaggacacccucaugauaucccgcaccccagaaguaaccugcguaguagucgacguuucacacgaagaccccgaagucaaauucaacugguacguagacggcgucgagguccacaacgccaaaaccaaaccucgcgaagaacaauacaacagcacauaccgcgucgucuccguccuaaccguacuacaccaagacuggcuaaacggcaaagaauacaagugcaaagucuccaacaaagcccuccccgcccccaucgagaaaaccauauccaaagccaaaggucaaccccgcgaaccccaaguauacacccuacccccaucccgcgacgagcucaccaaaaaccaaguaucccuaaccugccucgucaaaggcuucuaccccuccgacauagccgucgaaugggaaagcaauggccagcccgaaaacaacuacaaaacaaccccacccguccucgacuccgacggcucuuucuuccucuacucaaaacucacagucgacaaaucacgauggcaacaaggcaacgucuucuccugcagcguaaugcacgaagcccuccacaaccacuacacccaaaaaucacucagccuaagccccggcaaguaaggacuaguuauaagacugacuagcccgaugggccucccaacgggcccuccuccccuccuugcaccgagauuaauaaaaaaaaaaaaaaaaaaaaaaaaaaaaaaaaaaaaaaaaaaaaaaaaaaaaaaaaaaaaaaaaugcaucccccccccccccccccccccccccccccccaaaggcucuuuucagagccaccagaauu

SEQ ID NO: 885 - RNA, 1564 nt, Artificial Sequence
  Ipilimumab HC without signale peptide
gggagaaagcuuacccaaguccaacuagucgaaucaggaggaggcguaguacaaccaggaagauccuuaagacuuucaugugcagcaucuggauuuaccuucucaucauacacaaugcacugggucagacaagcccccggaaaaggacuagaauggguaacauuuauaucauaugauggaaauaacaaauauuacgcagauucuguaaaaggaagauucaccaucucaagagauaauucaaaaaacacacuauaccuacaaaugaacucacucagagcugaagacaccgcaauauacuauugcgcaagaacaggaugguuaggaccuuucgauuacuggggacaaggaacacuaguuaccgucuccuccgcaaguaccaaaggaccaucuguauucccauuagcaccaucauccaaaucaacaucaggaggaaccgcagcauuaggaugcuuaguaaaagacuacuuuccugaacccguaacaguaucauggaauuccggagcacuaacaucaggaguacauaccuuuccagcaguacuccaaucaucaggauuauauuccuuaucuucaguaguaacagucccaucaucuucacuagguacacaaaccuacaucugcaauguaaaccacaaaccaucaaauacaaaagucgacaaaagaguugaaccaaaaucaugugacaaaacucacacaugcccaccauguccagccccagaauuacuaggaggaccaucaguauuccuuuucccaccaaaaccaaaagauacucuaaugauaucccguaccccagaaguaacaugcgucguaguagacguaucacacgaagaccccgaaguaaaauucaauugguacgucgacggaguagaaguacacaacgccaaaacaaaaccccgagaagaacaauacaacuccacauaccguguaguaucaguauuaacagucuuacaccaagacuggcuaaacggaaaagaauacaaauguaaaguuuccaacaaagcacucccagccccuaucgaaaaaaccauaucaaaagcaaaaggccaacccagagaaccccaaguuuauacacuaccaccaucaagagacgaauuaacaaaaaaccaaguaucccuaacaugccuaguaaaaggauucuacccuucagacaucgcaguagaaugggaauccaacggacaaccugaaaacaacuauaaaacaacaccaccaguauuagauagcgauggaucuuucuucuuauauucaaaacuuacaguagacaaaucucgauggcaacaaggaaacguauucucaugcuccguaaugcacgaagcgcuacauaaccauuacacacaaaaaucacuaucauuaucaccaggaaaauaaggacuaguuauaagacugacuagcccgaugggccucccaacgggcccuccuccccuccuugcaccgagauuaauaaaaaaaaaaaaaaaaaaaaaaaaaaaaaaaaaaaaaaaaaaaaaaaaaaaaaaaaaaaaaaaaugcaucccccccccccccccccccccccccccccccaaaggcucuuuucagagccaccagaauu

SEQ ID NO: 886 - RNA, 1564 nt, Artificial Sequence
  Ipilimumab HC without signale peptide
gggagaaagcuuacccaaguucaauuaguagaaucuggaggaggaguaguccaaccaggacguucacuaagacucucuugugcagcuucaggauuuacguucucaagcuauaccaugcacuggguaagacaagccccaggaaaaggauuagaauggguaacauuuauaucuuacgacggcaauaacaaauauuaugcagacucaguuaaagguagauucacaauaagccgagacaauucaaaaaacacucuauaucuacaaaugaauagccuaagagcagaagauacagcaauauauuacugugcacguacaggaugguuagguccuuucgauuacuggggacaagguacucuaguuacaguaagcagcgcaucuaccaaaggaccaagcguauucccucuugcuccaucaagcaaauccacaucaggcggaacagcugcauuaggaugcuuaguaaaagacuauuucccagaacccguaacgguaucuuggaacagcggcgcauuaacaucaggaguacauacuuuuccugcaguacuacaaagcuccggauuauacucuuuaucaucaguaguaacaguaccauccucaucacuaggaacacaaacauauauauguaacguaaaucauaaaccaucaaacaccaaaguagacaaaagaguagaaccaaaaucaugugauaaaacucacaccuguccuccauguccagcacccgaauuauuaggagguccaaguguauucuuauuuccaccaaaaccuaaagauacccuaaugauaucaagaacaccagaaguaacauguguaguaguagacgucucacacgaagacccagaaguaaaauucaacugguacguagacggaguagaaguacauaacgcuaaaacuaaaccacgagaagaacaauacaauaguacauacagaguagugucaguauuaacaguauuacaccaagacuggcuaaauggaaaagaauacaaauguaaaguaucaaauaaagcacuaccagcaccaaucgaaaaaaccaucuccaaagccaaaggacaaccccgugaaccucaagucuauacccuaccacccucaagagacgaacuuacaaaaaaccaaguaagcuuaacaugucuaguaaaaggauucuauccauccgacauagcaguagaaugggaaucaaauggucaaccagaaaacaacuacaaaacaacaccaccaguucucgauucagauggaucauuuuuucuauauagcaaauuaacuguagacaaaucuagauggcaacaaggaaauguauucucauguucaguaaugcaugaagcacuccacaaucauuacacacaaaaaaguuuaaguuuauccccaggcaaauaaggacuaguuauaagacugacuagcccgaugggccucccaacgggcccuccuccccuccuugcaccgagauuaauaaaaaaaaaaaaaaaaaaaaaaaaaaaaaaaaaaaaaaaaaaaaaaaaaaaaaaaaaaaaaaaaugcaucccccccccccccccccccccccccccccccaaaggcucuuuucagagccaccagaauu

SEQ ID NO: 887 - RNA, 1564 nt, Artificial Sequence
  Ipilimumab backbone Rituximab HC without signale peptide
gggagaaagcuuacccaggugcagcuggucgagagcggcgggggcguggugcagcccgggcgcucccuccggcugagcugcgccgccuccggcuucaccuucagcuccuacaccaugcacuggguccgccaggcgccggggaagggccuggagugggugacguucaucagcuacgacggcaacaacaaguacuacgccgacuccgugaaggggcgguucaccaucagccgcgacaacuccaagaacacccucuaccugcagaugaacagccugcgggccgaggacaccgccaucuacuacugcgcccgcacgggcuggcucgggcccuucgacuacuggggccaggggacccuggucaccguguccagcgcguccaccaagggccccagcguguucccccuggccccguccagcaaguccacgagcggcgggaccgccgcccucggcugccuggucaaggacuacuuccccgagcccgugaccguguccuggaacagcggggcgcugaccagcggcguccacacguuccccgccgugcuccaguccagcggccuguacucccugagcuccguggucaccgugccgagcuccagccucgggacccagaccuacaucugcaacgugaaccacaagcccuccaacacgaaggucgacaagcggguggagcccaagagcugcgacaagacccacacgugcccgcccugccccgcccccgagcugcugggcggcccgagcguguuccucuucccgcccaagcccaaggacacccugaugaucagccgcacccccgaggucacgugcgugguggucgacgugagccacgaggaccccgaggugaaguucaacugguacgucgacgggguggaggugcacaacgccaagaccaagccccgggaggagcaguacaacagcaccuaccgcgucgugagcgugcugaccguccuccaccaggacuggcugaacggcaaggaguacaagugcaaggugucgaacaaggcccugccggcccccaucgagaagacgaucagcaaggcgaagggccagccgcgggagccccaggucuacacccucccgcccagccgcgacgagcugaccaagaaccaggugucccugacgugccucgugaagggcuucuaccccagcgacaucgccgucgagugggagagcaacgggcagcccgagaacaacuacaagaccacgcccccggugcuggacuccgacggcagcuucuuccuguacuccaagcucaccguggacaagagccgguggcagcaggggaacgucuucuccugcagcgugaugcacgaggcccugcacaaccacuacacccagaagucccugagccucucccccggcaagugaggacuaguuauaagacugacuagcccgaugggccucccaacgggcccuccuccccuccuugcaccgagauuaauaaaaaaaaaaaaaaaaaaaaaaaaaaaaaaaaaaaaaaaaaaaaaaaaaaaaaaaaaaaaaaaaugcaucccccccccccccccccccccccccccccccaaaggcucuuuucagagccaccagaauu

SEQ ID NO: 888 - RNA, 1564 nt, Artificial Sequence
  Ipilimumab backbone Rituximab HC without signale peptide
gggagaaagcuuacccaggugcaacuggucgagagcggcgggggaguugugcagcccgguagaucccucaggcuuucuugcgccgcuucaggcuucaccuuuaguagcuacacaaugcacuggguacggcaggcaccugggaagggacuggaaugggugacuuucaucuccuaugacggcaacaauaaauacuaugccgauucugucaagggucgcuuuacgauuucgcgagacaacagcaaaaauaccuuguacuuacagaugaacucacugcgugcggaggauacagcuauauauuacugugccagaacuggguggcuaggaccauucgacuauuggggccaaggcacccucgugacaguuaguuccgcaucuaccaaggggccgagcguguuuccccuggccccuuccucaaaaaguacuagcggagguacagcugcacuuggcugccuggucaaggauuacuucccagaacccgugaccguaucuuggaacuccggggccuugacgucaggaguucauacuuuuccugcugugcuccagagcaguggccuguacucucuguccagcgucgugaccgugccaucgucuucccucgguacacagacuuauaucuguaaugucaaucacaagcccucaaacaccaaaguugacaagaggguggagccuaaaaguugcgauaagacacauaccuguccaccgugccccgcccccgagcugcugggcggcccgagcguguuccucuucccgcccaagcccaaggacacccugaugaucagccgcacccccgaggucacgugcgugguggucgacgugagccacgaggaccccgaggugaaguucaacugguacgucgacgggguggaggugcacaacgccaagaccaagccccgggaggagcaguacaacagcaccuaccgcgucgugagcgugcugaccguccuccaccaggacuggcugaacggcaaggaguacaagugcaaggugucgaacaaggcccugccggcccccaucgagaagacgaucagcaaggcgaaggggcagccuagggagccccagguuuacacgcuuccacccagccgggaugaacugaccaaaaaccaggugucuuugacaugucucguaaagggauuuuauccuucagacaucgccgucgagugggaaaguaauggucaaccagagaacaacuacaaaacuaccccgcccgugcuggacagcgauggcuccuucuuuuuauacucuaagcugacaguugacaaaucgcgcuggcagcaggggaauguguucagcugcuccgucaugcacgaggcacuccauaaccacuauacucaaaagucacuuagucugucuccuggaaagugaggacuaguuauaagacugacuagcccgaugggccucccaacgggcccuccuccccuccuugcaccgagauuaauaaaaaaaaaaaaaaaaaaaaaaaaaaaaaaaaaaaaaaaaaaaaaaaaaaaaaaaaaaaaaaaaugcaucccccccccccccccccccccccccccccccaaaggcucuuuucagagccaccagaauu

SEQ ID NO: 889 - RNA, 1564 nt, Artificial Sequence
  Ipilimumab backbone Rituximab HC without signale peptide
gggagaaagcuuacccaggugcagcugguggagagcggcggcggcguggugcagcccggcagaagccugagacugagcugcgccgccagcggcuucaccuucagcagcuacaccaugcacugggugagacaggcccccggcaagggccuggagugggugaccuucaucagcuacgacggcaacaacaaguacuacgccgacagcgugaagggcagauucaccaucagcagagacaacagcaagaacacccuguaccugcagaugaacagccugagagccgaggacaccgccaucuacuacugcgccagaaccggcuggcugggccccuucgacuacuggggccagggcacccuggugaccgugagcagcgccagcaccaagggccccagcguguucccccuggcccccagcagcaagagcaccagcggcggcaccgccgcccugggcugccuggugaaggacuacuuccccgagcccgugaccgugagcuggaacagcggcgcccugaccagcggcgugcacaccuuccccgccgugcugcagagcagcggccuguacagccugagcagcguggugaccgugcccagcagcagccugggcacccagaccuacaucugcaacgugaaccacaagcccagcaacaccaagguggacaagagaguggagcccaagagcugcgacaagacccacaccugcccccccugccccgcccccgagcugcugggcggcccgagcguguuccucuucccgcccaagcccaaggacacccugaugaucagccgcacccccgaggucacgugcgugguggucgacgugagccacgaggaccccgaggugaaguucaacugguacgucgacgggguggaggugcacaacgccaagaccaagccccgggaggagcaguacaacagcaccuaccgcgucgugagcgugcugaccguccuccaccaggacuggcugaacggcaaggaguacaagugcaaggugucgaacaaggcccugccggcccccaucgagaagacgaucagcaaggcgaagggccagcccagagagccccagguguacacccugccccccagcagagacgagcugaccaagaaccaggugagccugaccugccuggugaagggcuucuaccccagcgacaucgccguggagugggagagcaacggccagcccgagaacaacuacaagaccaccccccccgugcuggacagcgacggcagcuucuuccuguacagcaagcugaccguggacaagagcagauggcagcagggcaacguguucagcugcagcgugaugcacgaggcccugcacaaccacuacacccagaagagccugagccugagccccggcaagugaggacuaguuauaagacugacuagcccgaugggccucccaacgggcccuccuccccuccuugcaccgagauuaauaaaaaaaaaaaaaaaaaaaaaaaaaaaaaaaaaaaaaaaaaaaaaaaaaaaaaaaaaaaaaaaaugcaucccccccccccccccccccccccccccccccaaaggcucuuuucagagccaccagaauu

SEQ ID NO: 890 - RNA, 925 nt, Artificial Sequence; identical to SEQ ID NO: 595
  Ipilimumab LC with signale peptide

SEQ ID NO: 891 - RNA, 925 nt, Artificial Sequence
  Ipilimumab LC with signale peptide
gggagaaagcuuaccauggagacccccgcccagcuccucuuccuccuccuccucuggcuccccgacaccaccggcgagaucguccucacccagucccccggcacccucucccucucccccggcgagcgcgccacccucuccugccgcgccucccaguccgucggcuccuccuaccucgccugguaccagcagaagcccggccaggccccccgccuccucaucuacggcgccuucucccgcgccaccggcauccccgaccgcuucuccggcuccggcuccggcaccgacuucacccucaccaucucccgccucgagcccgaggacuucgccgucuacuacugccagcaguacggcuccucccccuggaccuucggccagggcaccaaggucgagaucaagcgcaccgucgccgcccccuccgucuucaucuucccccccuccgacgagcagcucaaguccggcaccgccuccgucgucugccuccucaacaacuucuacccccgcgaggccaagguccaguggaaggucgacaacgcccuccaguccggcaacucccaggaguccgucaccgagcaggacuccaaggacuccaccuacucccucuccuccacccucacccucuccaaggccgacuacgagaagcacaaggucuacgccugcgaggucacccaccagggccucuccucccccgucaccaaguccuucaaccgcggcgagugcugaggacuaguuauaagacugacuagcccgaugggccucccaacgggcccuccuccccuccuugcaccgagauuaauaaaaaaaaaaaaaaaaaaaaaaaaaaaaaaaaaaaaaaaaaaaaaaaaaaaaaaaaaaaaaaaaugcaucccccccccccccccccccccccccccccccaaaggcucuuuucagagccaccagaauu

SEQ ID NO: 892 - RNA, 925 nt, Artificial Sequence
  Ipilimumab LC with signale peptide
gggagaaagcuuaccauggagacccccgcccagcuucucuuccuucuguuguuauggcugccugacacaacuggcgaaaucgugcuaacgcaaagcccagggacccucucccugucuccgggagagagagcuacacuuucaugcagggcaagucagagcgucgguuccucuuaccuggccugguaucagcagaagcccggccaagcgccucgguugcucauuuacggggcuuuuucgcgcgccacuggaauaccagaucgauucucaggcagcgguagugggaccgacuuuacacugaccaucucccgucuggaacccgaggauuucgcaguuuauuacugucagcaguauggaucuagcccuuggacuuuuggccagggcacaaaaguggaaauuaagagaaccguagccgcuccauccguguucaucuuucccccuucagacgagcaacucaaaagugggacggcaagcgucgugugcuuacugaacaauuucuacccaagggaggccaagguucaguggaaaguggauaacgcucugcagucuggaaauucccaggaaucagucacugagcaagacagcaaggauaguaccuauucuuuguccagcacacugacucuaucgaaggccgacuacgaaaaacacaagguguacgcgugugagguaacccaucagggucucucuuccccgguuacaaaaucauuuaaccggggcgagugcugaggacuaguuauaagacugacuagcccgaugggccucccaacgggcccuccuccccuccuugcaccgagauuaauaaaaaaaaaaaaaaaaaaaaaaaaaaaaaaaaaaaaaaaaaaaaaaaaaaaaaaaaaaaaaaaaugcaucccccccccccccccccccccccccccccccaaaggcucuuuucagagccaccagaauu

SEQ ID NO: 893 - RNA, 925 nt, Artificial Sequence
  Ipilimumab LC with signale peptide
gggagaaagcuuaccauggagacccccgcccagcugcuguuccugcugcugcuguggcugcccgacaccaccggcgagaucgugcugacccagagccccggcacccugagccugagccccggcgagagagccacccugagcugcagagccagccagagcgugggcagcagcuaccuggccugguaccagcagaagcccggccaggcccccagacugcugaucuacggcgccuucagcagagccaccggcauccccgacagauucagcggcagcggcagcggcaccgacuucacccugaccaucagcagacuggagcccgaggacuucgccguguacuacugccagcaguacggcagcagccccuggaccuucggccagggcaccaagguggagaucaagagaaccguggccgcccccagcguguucaucuucccccccagcgacgagcagcugaagagcggcaccgccagcguggugugccugcugaacaacuucuaccccagagaggccaaggugcaguggaagguggacaacgcccugcagagcggcaacagccaggagagcgugaccgagcaggacagcaaggacagcaccuacagccugagcagcacccugacccugagcaaggccgacuacgagaagcacaagguguacgccugcgaggugacccaccagggccugagcagccccgugaccaagagcuucaacagaggcgagugcugaggacuaguuauaagacugacuagcccgaugggccucccaacgggcccuccuccccuccuugcaccgagauuaauaaaaaaaaaaaaaaaaaaaaaaaaaaaaaaaaaaaaaaaaaaaaaaaaaaaaaaaaaaaaaaaaugcaucccccccccccccccccccccccccccccccaaaggcucuuuucagagccaccagaauu

SEQ ID NO: 894 - RNA, 925 nt, Artificial Sequence
  Ipilimumab LC with signale peptide
gggagaaagcuuaccauggagacccccgcccagcuccuguuccugcuucugcucuggcugccugacacaacgggcgaaaucgugcuuacccaaagcccggggacacugucccucucucccggagagagagcuacccugagcugccgggccucccagucugucggcagcuccuaccuggcgugguaucagcagaaaccugggcaagcuccccgccuccugauuuacggagccuuuucuagagccacaggcaucccugaucgguucagcggguccggaagcggcaccgacuuuacacuuaccauuucucgccuggaacccgaggauuucgcuguuuauuacugucagcaguauggcuccagcccuuggacguuugggcagggaaccaaaguggaaaucaagagaacaguggccgcuccgucugucuucauuuuucccccuuccgacgagcaacucaaaagcggcaccgccucugugguuugccugcuuaacaauuucuacccccgggaggcgaaggugcaguggaaagucgauaacgcccugcaguccgggaauagccaggaauccgugacagagcaagacucuaaggauagcaccuauucccucagcucuacgcugacacuguccaaggcugacuacgaaaaacacaagguuuacgccugugaggugacccaucagggacucagcucuccugucacaaagagcuuuaaccgcggcgagugcugaggacuaguuauaagacugacuagcccgaugggccucccaacgggcccuccuccccuccuugcaccgagauuaauaaaaaaaaaaaaaaaaaaaaaaaaaaaaaaaaaaaaaaaaaaaaaaaaaaaaaaaaaaaaaaaaugcaucccccccccccccccccccccccccccccccaaaggcucuuuucagagccaccagaauu

SEQ ID NO: 895 - RNA, 925 nt, Artificial Sequence
  Ipilimumab LC with signale peptide
gggagaaagcuuaccauggaaacaccagcacaacuacuauucuuacuauuacuauggcuaccagacacaacaggagaaauaguacuaacacaaucaccaggaacacuaagucuaucaccaggagaaagagcaacacuaucaugcagagcaucccaaucaguuggaucuuccuaccuagccugguaucaacaaaaaccaggacaagcaccaagauuacuaauauacggagcauucucaagagcaacuggaaucccagauagauucucaggaucaggaucaggaacagacuucacauuaacaauaucacgacuagaaccagaagacuucgcaguauacuacugucaacaauacggauccucaccauggaccuucggccaaggaacaaaaguagaaauaaaaagaacaguagcagccccaucuguauucauauucccaccaucagaugaacaacuaaaaucaggaacagcaucaguaguaugcuuacuaaacaacuucuacccaagagaagccaaaguacaauggaaaguagacaacgcacuacaaucaggaaauucccaagaaucaguaacagaacaagacucaaaagacuccacauacucauuaucaucaacauuaacacuaucaaaagcagacuacgaaaaacacaaaguauacgcaugugaaguaacacaccaaggacuaucaucaccaguaacaaaaucauucaaccgaggagaaugcugaggacuaguuauaagacugacuagcccgaugggccucccaacgggcccuccuccccuccuugcaccgagauuaauaaaaaaaaaaaaaaaaaaaaaaaaaaaaaaaaaaaaaaaaaaaaaaaaaaaaaaaaaaaaaaaaugcaucccccccccccccccccccccccccccccccaaaggcucuuuucagagccaccagaauu

SEQ ID NO: 896 - RNA, 925 nt, Artificial Sequence
  Ipilimumab LC with signale peptide
gggagaaagcuuaccauggagacccccgcccagcuccuguuccuguugcugcucuggcugccagacacuaccggcgaaaucguguugacgcaaagcccggggacucugucccucagucccggugagagggcaacccugagcugccgggccucccagagugucggcagcuccuaccuggcgugguaucagcagaagccagggcaagcaccccgccuccugauuuacggcgccuuuagcagggccaccgguaucccagaucgguucuccgggaguggcagcggcacugacuuuaccuugacgauuucccgccuggaacccgaggauuucgcaguguauuacugucagcaguaugggagcaguccauggacuuuuggucagggcaccaaaguagaaaucaagaggacuguggccgcgccguccgucuucauuuuucccccaagcgacgagcaacucaaauccgggaccgccaguguggugugccugcugaacaauuucuacccccgggaggcaaagguccaguggaaaguggauaacgccuugcagagcggcaauucccaggaaagcguaaccgagcaagacaguaaggauuccacguauagccucaguuccacucugacccugagcaaggccgacuacgaaaaacacaagguguacgcaugugaggucacucaucagggucucagcuccccagugaccaaaaguuuuaaccgcggggagugcugaggacuaguuauaagacugacuagcccgaugggccucccaacgggcccuccuccccuccuugcaccgagauuaauaaaaaaaaaaaaaaaaaaaaaaaaaaaaaaaaaaaaaaaaaaaaaaaaaaaaaaaaaaaaaaaaugcaucccccccccccccccccccccccccccccccaaaggcucuuuucagagccaccagaauu

SEQ ID NO: 897 - RNA, 925 nt, Artificial Sequence
  Ipilimumab LC with signale peptide
gggagaaagcuuaccauggaaacccccgcccaacuccucuuccuauuacuccucuggcuacccgacaccaccggcgaaaucguccucacccaauccccaggcacccucucucucucccccggagaacgcgcaacacucuccugccgugcaucccaauccgucggaucuuccuaccucgccugguaccaacaaaaacccggccaagccccacgccuccucaucuacggcgccuucucccgcgccaccggcauuccagaccguuucucaggauccggcuccggcaccgauuucacacucaccaucucccgccuagaaccagaagacuucgccguauacuacugccagcaauacggaucuucccccuggacauucggccaaggcaccaaagucgaaaucaaacgcaccgucgcagcccccuccgucuucaucuucccacccuccgacgaacaacuaaaaucuggcacagcauccgucgucugccuccuaaacaacuucuacccccgcgaagccaaaguccaauggaaagucgacaacgcacuccaaucuggcaacucacaagaauccgucacagaacaagacuccaaagacucaaccuacucccucuccucaacccucacccucuccaaagccgacuacgaaaaacacaaggucuacgcaugcgaagucacccaucaaggacucuccucccccgucaccaaauccuucaaccgcggcgaaugcuaaggacuaguuauaagacugacuagcccgaugggccucccaacgggcccuccuccccuccuugcaccgagauuaauaaaaaaaaaaaaaaaaaaaaaaaaaaaaaaaaaaaaaaaaaaaaaaaaaaaaaaaaaaaaaaaaugcaucccccccccccccccccccccccccccccccaaaggcucuuuucagagccaccagaauu

SEQ ID NO: 898 - RNA, 925 nt, Artificial Sequence
  Ipilimumab LC with signale peptide
gggagaaagcuuaccauggaaacacccgcccaacuccucuuccuccuccuccucuggcuacccgacaccaccggcgaaaucguccucacccaaucccccggcacccuaucccucucccccggcgaacgcgccacccuauccugccgcgcaucccaauccguaggauccuccuaccucgccugguaccaacaaaaacccggccaagcaccccgccuccucaucuacggagccuucucccgcgccaccggcaucccugaccgcuucuccggcucaggcucaggcaccgacuucacccucaccaucucucgccuagaacccgaagacuucgccguauacuauugccaacaauacggcuccuccccuuggaccuucggccaaggaacaaaagucgaaaucaaacgaaccgucgccgcccccucagucuucaucuucccacccuccgacgaacaacucaaauccgguaccgccuccgucgucugccuucucaacaacuucuacccccgagaagccaaaguacaauggaaagucgacaacgcacuacaaucaggcaacucccaagaauccgucaccgaacaagauuccaaagacucaaccuacucacucuccuccacacucacccucuccaaagccgacuacgaaaaacacaaagucuacgccugcgaagucacccaccaaggacucuccagccccgucaccaaauccuucaaccgcggcgaaugcuaaggacuaguuauaagacugacuagcccgaugggccucccaacgggcccuccuccccuccuugcaccgagauuaauaaaaaaaaaaaaaaaaaaaaaaaaaaaaaaaaaaaaaaaaaaaaaaaaaaaaaaaaaaaaaaaaugcaucccccccccccccccccccccccccccccccaaaggcucuuuucagagccaccagaauu

SEQ ID NO: 899 - RNA, 925 nt, Artificial Sequence
  Ipilimumab LC with signale peptide
gggagaaagcuuaccauggaaacucccgcccaacuacucuuccuccuccuccucuggcuccccgacaccaccggcgaaaucguccuuacccagucccccggcacccucucacucucccccggcgaacgcgccacccuauccugucgcgccucccaaucagucggcucaucauaccucgccugguaccaacaaaaacccggccaagccccucgccuccucauauacggcgccuucucccgcgccaccggcauccccgaccgauucuccggcuccggcuccggcacugacuucacccucaccauaucccgccucgaacccgaagacuucgcagucuacuacugccaacaauacggaucuucccccuggaccuucggccaaggcaccaaagucgaaaucaaacgcaccgucgccgcccccuccgucuucauauucccacccucagacgaacaacucaaaucaggcaccgcauccgucgucugccuccucaacaacuucuacccccgcgaagccaaaguccaauggaaagucgacaacgcccuccaaucaggcaacucacaagaauccgucacagaacaagacuccaaagacucaaccuacucccucuccucaacccucacacucuccaaagccgacuacgaaaaacacaaagucuacgccugcgaagucacccaccaaggacuuuccucacccgucaccaaauccuucaaccgcggcgaaugcuaaggacuaguuauaagacugacuagcccgaugggccucccaacgggcccuccuccccuccuugcaccgagauuaauaaaaaaaaaaaaaaaaaaaaaaaaaaaaaaaaaaaaaaaaaaaaaaaaaaaaaaaaaaaaaaaaugcaucccccccccccccccccccccccccccccccaaaggcucuuuucagagccaccagaauu

SEQ ID NO: 900 - RNA, 925 nt, Artificial Sequence
  Ipilimumab LC with signale peptide
gggagaaagcuuaccauggaaacaccagcacaacuauuauuccuauuacuucuauggcuaccagacacaacaggagaaauaguauuaacacaaagcccaggaacacucucauuaucaccaggagaaagagcaacacucucaugccgagcaucccaauccgucggaucaucauaucuagcaugguaccaacaaaaaccaggacaagcacccagacuacuaauauacggagcauuuucaagagccacaggaaucccagacagauuuucaggaucaggaucaggaacagacuucacauuaacaauaucacgauuagaacccgaagacuucgcaguauacuacugccaacaauacggaucaucucccuggacauucggacaaggcacaaaaguagaaauaaaacgaacagucgcagcaccaucaguauucauauucccaccaucagacgaacaacuaaaaucaggaacagcaucaguaguaugccuauuaaauaacuucuacccaagagaagcaaaaguccaauggaaaguagauaacgcacuacaaucaggaaacucucaagaaucaguaaccgaacaagacucaaaagauucaaccuacucauuaucaucaacauuaacacuaucaaaagcagacuacgaaaaacacaaaguauacgcaugcgaaguaacccaccaaggccuaucaucaccaguaacaaaaucauucaacagaggagaaugcugaggacuaguuauaagacugacuagcccgaugggccucccaacgggcccuccuccccuccuugcaccgagauuaauaaaaaaaaaaaaaaaaaaaaaaaaaaaaaaaaaaaaaaaaaaaaaaaaaaaaaaaaaaaaaaaaugcaucccccccccccccccccccccccccccccccaaaggcucuuuucagagccaccagaauu

SEQ ID NO: 901 - RNA, 925 nt, Artificial Sequence
  Ipilimumab LC with signale peptide
gggagaaagcuuaccauggaaaccccugcccaauuacuauucuuauuauuacucuggcuaccagacacaacaggagaaauaguuuuaacacaaucaccaggcacacuaucacuaucaccaggagaaagagcaacacuaucaugcagagccucacaaucagucggaucaucauaccuagcaugguaucaacaaaaacccggacaagcaccaagauuauuaauauauggagcauucucacgagcaaccggaauaccagauagauucucaggaucaggaagcggcaccgacuucacauuaacaauaucuagacuagaaccagaagauuucgcaguauacuacugccaacaauauggaucuucaccauggacauucggacaaggaacaaaaguugaaauaaaaagaacaguagcagcaccaucaguauucauauucccaccaucagacgaacaauuaaaaucaggaacagccucuguaguaugccuauuaaacaacuuuuacccaagagaagcaaaaguucaauggaaaguagacaaugcacuacaaucaggcaacucacaagaaucaguaacagaacaagacucuaaagacucaacauauagccuaucaucaacacucacccuaucaaaagcagacuacgaaaaacacaaaguauacgcaugugaaguaacacaccaaggacuaucaucaccaguaacaaaaucauucaacagaggagaaugcuaaggacuaguuauaagacugacuagcccgaugggccucccaacgggcccuccuccccuccuugcaccgagauuaauaaaaaaaaaaaaaaaaaaaaaaaaaaaaaaaaaaaaaaaaaaaaaaaaaaaaaaaaaaaaaaaaugcaucccccccccccccccccccccccccccccccaaaggcucuuuucagagccaccagaauu

SEQ ID NO: 902 - RNA, 925 nt, Artificial Sequence
  Ipilimumab backbone Rituximab LC with signale peptide
gggagaaagcuuaccauggagacccccgcccagcugcucuuccugcugcuccuguggcugccggacaccacgggcgagaucgugcugacccagagccccggcacccucucccugagcccgggggagcgcgccacgcuguccugccgggccagccaguccgucggcagcuccuaccucgcgugguaccagcagaagcccgggcaggcgccccgccugcugaucuacggcgccuucagccgggccaccgggauccccgaccgcuucuccggcagcggcuccgggaccgacuucacccucacgaucagccggcuggagccggaggacuucgccguguacuacugccagcaguacggcuccagccccuggaccuucgggcagggcaccaagguggagaucaagcgcaccguggcggcccccagcguguucaucuucccgcccagcgacgagcagcugaagagcgggaccgccucggucgugugccuccugaacaacuucuacccccgggaggccaaggugcaguggaaggucgacaacgcgcugcagagcggcaacagccaggagagcgugacggagcaggacagcaaggacagcaccuacucgcucagcagcacccugacccugagcaaggccgacuacgagaagcacaagguguacgccugcgaggucacgcaccaggggcucagcucgcccgugaccaagagcuucaaccgcggggagugcugaggacuaguuauaagacugacuagcccgaugggccucccaacgggcccuccuccccuccuugcaccgagauuaauaaaaaaaaaaaaaaaaaaaaaaaaaaaaaaaaaaaaaaaaaaaaaaaaaaaaaaaaaaaaaaaaugcaucccccccccccccccccccccccccccccccaaaggcucuuuucagagccaccagaauu

SEQ ID NO: 903 - RNA, 925 nt, Artificial Sequence
  Ipilimumab backbone Rituximab LC with signale peptide
gggagaaagcuuaccauggagacccccgcccagcuucucuuccuucuguuguuauggcugccugacacaacuggcgaaaucgugcuaacgcaaagcccagggacccucucccugucuccgggagagagagcuacacuuucaugcagggcaagucagagcgucgguuccucuuaccuggccugguaucagcagaagcccggccaagcgccucgguugcucauuuacggggcuuuuucgcgcgccacuggaauaccagaucgauucucaggcagcgguagugggaccgacuuuacacugaccaucucccgucuggaacccgaggauuucgcaguuuauuacugucagcaguauggaucuagcccuuggacuuuuggccagggcacaaaaguggaaauuaagagaaccguggcggcccccagcguguucaucuucccgcccagcgacgagcagcugaagagcgggaccgccucggucgugugccuccugaacaacuucuacccccgggaggccaaggugcaguggaaggucgacaacgcgcugcagagcggcaacagccaggagagcgugacggagcaggacagcaaggacagcaccuacucgcucagcagcacccugacccugagcaaggccgacuacgagaagcacaagguguacgccugcgaggucacgcaccaggggcucagcucgcccgugaccaagagcuucaaccgcggcgagugcugaggacuaguuauaagacugacuagcccgaugggccucccaacgggcccuccuccccuccuugcaccgagauuaauaaaaaaaaaaaaaaaaaaaaaaaaaaaaaaaaaaaaaaaaaaaaaaaaaaaaaaaaaaaaaaaaugcaucccccccccccccccccccccccccccccccaaaggcucuuuucagagccaccagaauu

SEQ ID NO: 904 - RNA, 925 nt, Artificial Sequence
  Ipilimumab backbone Rituximab LC with signale peptide
gggagaaagcuuaccauggagacccccgcccagcugcuguuccugcugcugcuguggcugcccgacaccaccggcgagaucgugcugacccagagccccggcacccugagccugagccccggcgagagagccacccugagcugcagagccagccagagcgugggcagcagcuaccuggccugguaccagcagaagcccggccaggcccccagacugcugaucuacggcgccuucagcagagccaccggcauccccgacagauucagcggcagcggcagcggcaccgacuucacccugaccaucagcagacuggagcccgaggacuucgccguguacuacugccagcaguacggcagcagccccuggaccuucggccagggcaccaagguggagaucaagagaaccguggcggcccccagcguguucaucuucccgcccagcgacgagcagcugaagagcgggaccgccucggucgugugccuccugaacaacuucuacccccgggaggccaaggugcaguggaaggucgacaacgcgcugcagagcggcaacagccaggagagcgugacggagcaggacagcaaggacagcaccuacucgcucagcagcacccugacccugagcaaggccgacuacgagaagcacaagguguacgccugcgaggucacgcaccaggggcucagcucgcccgugaccaagagcuucaaccgcggcgagugcugaggacuaguuauaagacugacuagcccgaugggccucccaacgggcccuccuccccuccuugcaccgagauuaauaaaaaaaaaaaaaaaaaaaaaaaaaaaaaaaaaaaaaaaaaaaaaaaaaaaaaaaaaaaaaaaaugcaucccccccccccccccccccccccccccccccaaaggcucuuuucagagccaccagaauu

SEQ ID NO: 905 - RNA, 865 nt, Artificial Sequence
  Ipilimumab LC without signale peptide
gggagaaagcuuaccgagaucgugcugacccagagccccggcacccucucccugagcccgggggagcgcgccacgcuguccugccgggccagccaguccgucggcagcuccuaccucgcgugguaccagcagaagcccgggcaggcgccccgccugcugaucuacggcgccuucagccgggccaccgggauccccgaccgcuucuccggcagcggcuccgggaccgacuucacccucacgaucagccggcuggagccggaggacuucgccguguacuacugccagcaguacggcuccagccccuggaccuucgggcagggcaccaagguggagaucaagcgcaccgucgccgcccccuccguguucaucuucccgcccagcgacgagcagcugaaguccgggacggccagcguggucugccuccugaacaacuucuacccccgggaggccaaggugcaguggaagguggacaacgcgcugcaguccggcaacagccaggagagcgucaccgagcaggacuccaaggacagcaccuacucccucagcuccacccugacgcugagcaaggccgacuacgagaagcacaagguguacgccugcgaggugacccaccagggccucuccagccccgucaccaaguccuucaaccgcggggagugcugaggacuaguuauaagacugacuagcccgaugggccucccaacgggcccuccuccccuccuugcaccgagauuaauaaaaaaaaaaaaaaaaaaaaaaaaaaaaaaaaaaaaaaaaaaaaaaaaaaaaaaaaaaaaaaaaugcaucccccccccccccccccccccccccccccccaaaggcucuuuucagagccaccagaauu

SEQ ID NO: 906 - RNA, 865 nt, Artificial Sequence
  Ipilimumab LC without signale peptide
gggagaaagcuuaccgagaucguccucacccagucccccggcacccucucccucucccccggcgagcgcgccacccucuccugccgcgccucccaguccgucggcuccuccuaccucgccugguaccagcagaagcccggccaggccccccgccuccucaucuacggcgccuucucccgcgccaccggcauccccgaccgcuucuccggcuccggcuccggcaccgacuucacccucaccaucucccgccucgagcccgaggacuucgccgucuacuacugccagcaguacggcuccucccccuggaccuucggccagggcaccaaggucgagaucaagcgcaccgucgccgcccccuccgucuucaucuucccccccuccgacgagcagcucaaguccggcaccgccuccgucgucugccuccucaacaacuucuacccccgcgaggccaagguccaguggaaggucgacaacgcccuccaguccggcaacucccaggaguccgucaccgagcaggacuccaaggacuccaccuacucccucuccuccacccucacccucuccaaggccgacuacgagaagcacaaggucuacgccugcgaggucacccaccagggccucuccucccccgucaccaaguccuucaaccgcggcgagugcugaggacuaguuauaagacugacuagcccgaugggccucccaacgggcccuccuccccuccuugcaccgagauuaauaaaaaaaaaaaaaaaaaaaaaaaaaaaaaaaaaaaaaaaaaaaaaaaaaaaaaaaaaaaaaaaaugcaucccccccccccccccccccccccccccccccaaaggcucuuuucagagccaccagaauu

SEQ ID NO: 907 - RNA, 865 nt, Artificial Sequence
  Ipilimumab LC without signale peptide
gggagaaagcuuaccgagaucgugcugacccagagccccggcacacucucccuuucuccuggggaaagagccacucugucaugcagggcuagucaaagcgucggauccucuuacuuggcaugguaucagcagaagccaggucaggccccgcgguuacugauuuacggcgcguucucgcgcgcuacggggauacccgaccgauuuucaggaagcggcagugguaccgauuucacacuaacuaucucccgucucgagccugaagacuuugccguuuauuacugucaacaguaugggucuagcccauggaccuucggacagggcacaaaaguggagauuaagagaaccguagcagcccccuccguguuuaucuucccuccaucagaugaacagcugaaaaguggcacugcuagcgucgugugccuucugaacaauuuuuaccccagggaggcaaagguucaauggaaaguggacaacgccuugcagucuggaaauucccaggagucagucacagaacaggauagcaaggacaguaccuauucucucuccagcacgcugacucugucgaaggcugauuacgagaaacacaagguguacgccugugaaguaacccaucaagggcucucuuccccuguuacaaaaucauucaaccggggugagugcugaggacuaguuauaagacugacuagcccgaugggccucccaacgggcccuccuccccuccuugcaccgagauuaauaaaaaaaaaaaaaaaaaaaaaaaaaaaaaaaaaaaaaaaaaaaaaaaaaaaaaaaaaaaaaaaaugcaucccccccccccccccccccccccccccccccaaaggcucuuuucagagccaccagaauu

SEQ ID NO: 908 - RNA, 865 nt, Artificial Sequence
  Ipilimumab LC without signale peptide
gggagaaagcuuaccgagaucgugcugacccagagccccggcacccugagccugagccccggcgagagagccacccugagcugcagagccagccagagcgugggcagcagcuaccuggccugguaccagcagaagcccggccaggcccccagacugcugaucuacggcgccuucagcagagccaccggcauccccgacagauucagcggcagcggcagcggcaccgacuucacccugaccaucagcagacuggagcccgaggacuucgccguguacuacugccagcaguacggcagcagccccuggaccuucggccagggcaccaagguggagaucaagagaaccguggccgcccccagcguguucaucuucccccccagcgacgagcagcugaagagcggcaccgccagcguggugugccugcugaacaacuucuaccccagagaggccaaggugcaguggaagguggacaacgcccugcagagcggcaacagccaggagagcgugaccgagcaggacagcaaggacagcaccuacagccugagcagcacccugacccugagcaaggccgacuacgagaagcacaagguguacgccugcgaggugacccaccagggccugagcagccccgugaccaagagcuucaacagaggcgagugcugaggacuaguuauaagacugacuagcccgaugggccucccaacgggcccuccuccccuccuugcaccgagauuaauaaaaaaaaaaaaaaaaaaaaaaaaaaaaaaaaaaaaaaaaaaaaaaaaaaaaaaaaaaaaaaaaugcaucccccccccccccccccccccccccccccccaaaggcucuuuucagagccaccagaauu

SEQ ID NO: 909 - RNA, 865 nt, Artificial Sequence
  Ipilimumab LC without signale peptide
gggagaaagcuuaccgagaucgugcugacccagagccccggcacacucagccugucuccuggggaaagagccacgcuuagcugccgggcuucccaaucugucggaagcuccuaccuggccugguaucagcagaagccgggccaggcgccccgccuccugauuuacggggcuuucucuagagccaccggaaucccugaccgguuuagcggcuccgggagcggaacagauuucacccuuacaauuucucgccuggagcccgaagacuuugccguuuauuacugucaacaguauggcuccagcccuuggaccuucggccaggggacaaaaguggagaucaagagaaccguggcugcccccucugucuuuauuuucccuccguccgaugaacagcucaaaagcggaacggcuucugugguuugccugcugaacaauuuuuacccccgggaggccaaggugcaauggaaagucgacaacgcgcuccaguccggcaauagccaggaguccgugaccgaacaggauucuaaggacagcacauauucccugagcucuacccuuacacuguccaaggccgauuacgagaaacacaagguuuacgcuugugaagugacccaucaagggcucagcucuccugucacgaaauccuucaaccgcggagagugcugaggacuaguuauaagacugacuagcccgaugggccucccaacgggcccuccuccccuccuugcaccgagauuaauaaaaaaaaaaaaaaaaaaaaaaaaaaaaaaaaaaaaaaaaaaaaaaaaaaaaaaaaaaaaaaaaugcaucccccccccccccccccccccccccccccccaaaggcucuuuucagagccaccagaauu

SEQ ID NO: 910 - RNA, 865 nt, Artificial Sequence
  Ipilimumab LC without signale peptide
gggagaaagcuuaccgaaauaguacuaacacaaucaccaggaacccucucacuaucuccaggagaaagagcaacacuaagcugcagagccucacaaucagucggaucaucauaccuagcaugguaccaacaaaaaccaggacaagcccccagauuacuaaucuacggagcauucucacgagcaacaggaaucccagacagauucucagguuccggaucaggaacagacuucacacuaacaauauccagauuagaaccagaagacuucgcaguauacuacugccaacaauacggaucaucaccauggacauuuggacaaggaaccaaaguagaaaucaaaagaacaguagcagccccaucaguauuuauauucccaccaucagacgaacaacuaaaaucaggcaccgcaucaguaguaugucuauuaaacaacuucuacccaagagaagcaaaaguacaauggaaaguagacaacgcacuacaaucaggaaacucccaagaaucagucacagaacaagacucaaaagacucaacauacucacuaucaucaacacuaaccuuaucaaaagcagacuacgaaaaacacaaaguauacgcaugcgaaguaacacaccaaggauuaucauccccaguaacaaaaucauucaacagaggagaaugcugaggacuaguuauaagacugacuagcccgaugggccucccaacgggcccuccuccccuccuugcaccgagauuaauaaaaaaaaaaaaaaaaaaaaaaaaaaaaaaaaaaaaaaaaaaaaaaaaaaaaaaaaaaaaaaaaugcaucccccccccccccccccccccccccccccccaaaggcucuuuucagagccaccagaauu

SEQ ID NO: 911 - RNA, 865 nt, Artificial Sequence
  Ipilimumab LC without signale peptide
gggagaaagcuuaccgagaucgugcugacccagagccccggcacucucucccugaguccaggggaaagggccaccuugagcugccgggcaucccaaagugucgguagcuccuaccuggccugguaucagcagaagccgggccaggcgccccgccuccugauuuacggggccuucagcagggcaacgggcaucccagaccgguuuuccgguagugggagcggcacugauuucaccuugaccauuucccgccuggagcccgaagacuuugccguguauuacugucaacaguauggcagcaguccauggacuuucgggcaggguaccaaaguagagaucaagaggacgguggcagcccccuccgucuuuauuuucccaccgagcgaugaacagcucaaauccggcacugcgaguguggugugccugcugaacaauuuuuacccccgggaggccaagguccaauggaaaguggacaacgcacuccagagcggcaauucccaggagagcguaaccgaacaggauaguaaggacuccacuuauagccugaguuccaccuugacccugagcaaggccgauuacgagaaacacaagguguacgccugugaagucacgcaucaagggcucagcuccccagugacuaaaaguuucaaccgcggugagugcugaggacuaguuauaagacugacuagcccgaugggccucccaacgggcccuccuccccuccuugcaccgagauuaauaaaaaaaaaaaaaaaaaaaaaaaaaaaaaaaaaaaaaaaaaaaaaaaaaaaaaaaaaaaaaaaaugcaucccccccccccccccccccccccccccccccaaaggcucuuuucagagccaccagaauu

SEQ ID NO: 912 - RNA, 865 nt, Artificial Sequence
  Ipilimumab LC without signale peptide
gggagaaagcuuaccgaaaucguccuaacccaaucccccggcacacuaucucucuccccaggcgaacgcgcaacacuauccugccgcgccucacaaucagucggcuccuccuaccuagccugguaccaacaaaaacccggccaagcaccccgacuccucaucuacggcgccuucucccgcgccacaggcaucccagaccgcuucuccggcuccggcuccggcacagacuucacacucaccaucucacgccucgaacccgaagacuucgccgucuacuacugccaacaauacggaucaucccccuggaccuucggacaaggcaccaaagucgaaaucaaacgcaccgucgccgcccccuccgucuucaucuucccacccucagacgaacaacuaaaauccggcaccgccucaguagucugccuacuaaacaacuucuacccccgcgaagccaaaguccaauggaaagucgacaacgcccuccaauccggcaacucacaagaaucagucaccgaacaagacucaaaagacuccaccuacucccuauccuccacccucacccuaucaaaagccgacuacgaaaaacacaaaguauacgcgugcgaaguaacccaccagggccuauccucacccgucacaaaauccuucaaccgcggcgaaugcugaggacuaguuauaagacugacuagcccgaugggccucccaacgggcccuccuccccuccuugcaccgagauuaauaaaaaaaaaaaaaaaaaaaaaaaaaaaaaaaaaaaaaaaaaaaaaaaaaaaaaaaaaaaaaaaaugcaucccccccccccccccccccccccccccccccaaaggcucuuuucagagccaccagaauu

SEQ ID NO: 913 - RNA, 865 nt, Artificial Sequence
  Ipilimumab LC without signale peptide
gggagaaagcuuaccgaaaucguacuaacccaaucacccggcacccucucccucucccccggcgaacgagccacccuaucaugccgcgccucccaauccguaggcuccuccuaccuagccugguaccaacaaaaaccaggccaagcaccccgacuacucaucuacggagccuucucccgcgccaccggcauccccgaccgcuucuccggcuccggcuccggcaccgacuucacccucaccaucucccgccucgaacccgaagacuucgccgucuacuacugccaacaauacggaucaucccccuggaccuucggccaaggcaccaaagucgaaaucaaacgcaccgucgccgcccccuccgucuucauauucccacccuccgacgaacaacuaaaaucaggaaccgccuccgucgucugccuacuaaacaacuucuacccccgcgaagccaaaguacaauggaaagucgacaacgcccuccaauccggcaacucccaagaauccguaaccgaacaagacuccaaagacucaaccuauucccucuccuccacacucacacuauccaaagccgacuacgaaaaacacaaagucuacgccugcgaaguaacccaccaaggccucucaucacccgucaccaaauccuucaaccgcggcgaaugcuaaggacuaguuauaagacugacuagcccgaugggccucccaacgggcccuccuccccuccuugcaccgagauuaauaaaaaaaaaaaaaaaaaaaaaaaaaaaaaaaaaaaaaaaaaaaaaaaaaaaaaaaaaaaaaaaaugcaucccccccccccccccccccccccccccccccaaaggcucuuuucagagccaccagaauu

SEQ ID NO: 914 - RNA, 865 nt, Artificial Sequence
  Ipilimumab LC without signale peptide
gggagaaagcuuaccgaaaucguccucacccaaucccccggcacccuaucacucucacccggcgaacgcgcaacccucuccugccgagccucccaauccgucggcuccucauaccucgccugguaccaacaaaaacccggccaagcaccccgucuccucaucuacggcgccuucucacgcgccaccggcauccccgaccgcuucuccggcucuggcucaggcaccgacuucacccucaccaucucccgccucgaacccgaagacuucgccgucuacuacugccaacaauacggaucaucccccuggaccuucggccaaggcacaaaagucgaaaucaaacgcaccgucgccgccccauccgucuucaucuucccacccuccgacgaacaacucaaauccggcaccgccuccgucgucugccuccucaacaacuucuacccccgcgaagccaaaguccaauggaaagucgacaacgcccuccaauccggcaacucccaagaauccgucaccgaacaagacuccaaagacuccaccuacucacucuccuccacccuuacccucuccaaagccgacuacgaaaaacacaaagucuacgccugcgaagucacccaccaaggccucuccucccccgucaccaaauccuucaaccgcggcgaaugcuaaggacuaguuauaagacugacuagcccgaugggccucccaacgggcccuccuccccuccuugcaccgagauuaauaaaaaaaaaaaaaaaaaaaaaaaaaaaaaaaaaaaaaaaaaaaaaaaaaaaaaaaaaaaaaaaaugcaucccccccccccccccccccccccccccccccaaaggcucuuuucagagccaccagaauu

SEQ ID NO: 915 - RNA, 865 nt, Artificial Sequence
  Ipilimumab LC without signale peptide
gggagaaagcuuaccgaaauaguacuaacacaaucaccaggaacacuaucacucucaccuggagaaagagcaacauuauccugcagagcaucacaaucuguaggaucuucauaccuagcaugguaccaacaaaaaccaggacaagcaccaagauuacuaauauauggagcauuuuccagagcaacaggcauaccagacagauucucaggaucaggaucaggaaccgacuucacacuaacaauaucaagacuagaaccagaagacuucgcaguauacuacugccaacaauacggaucaucaccauggacauucggacaaggaacaaaaguagaaauaaaaagaacagucgcagcaccaucaguauucauauucccaccaucagacgaacaauuaaaauccggaacagcaucaguaguaugccuacuaaauaacuucuacccaagagaagcaaaaguacaauggaaaguagacaacgcauuacaaucaggaaacucccaagaaucaguaacagaacaagacucuaaagacucaacauacucccuaucaucaacacuaacacuaucaaaagcagacuaugaaaaacacaaaguauacgcaugcgaagucacacaucaaggacuaucaucaccaguaacaaaaucauuuaacagaggagaaugcuaaggacuaguuauaagacugacuagcccgaugggccucccaacgggcccuccuccccuccuugcaccgagauuaauaaaaaaaaaaaaaaaaaaaaaaaaaaaaaaaaaaaaaaaaaaaaaaaaaaaaaaaaaaaaaaaaugcaucccccccccccccccccccccccccccccccaaaggcucuuuucagagccaccagaauu

SEQ ID NO: 916 - RNA, 865 nt, Artificial Sequence
  Ipilimumab LC without signale peptide
gggagaaagcuuaccgaaauaguacuaacacaaucaccaggaacauuaucacuauccccaggagaaagagcaacauuaucaugcagagcaucacaaucaguaggaucaucauaccuagccugguaccaacaaaaaccaggacaagccccaagauuacuaauauacggagcauucucaagagcaacaggaauaccagacagauucucagguucuggcucaggcacagacuucacacucacaauaucaagacuagaaccagaagacuucgccguauacuacugccaacaauacggauccucaccauggacauucggacaaggaacaaaaguagaaauaaaacgaacaguagcagcaccaucaguauucauauucccaccaucagacgaacaauuaaaaucaggaacagcaucaguaguaugccuauuaaacaacuucuacccacgagaagccaaaguccaauggaaaguagauaacgcauuacaaucagguaacucacaagaaucaguaacagaacaagacuccaaagacucaacauacagccuaucaucaacacuaacauuaucaaaagcagacuaugaaaaacacaaaguauacgcaugcgagguaacacaccaaggacuaucaucaccaguaacaaaaucauucaauagaggagaaugcuaaggacuaguuauaagacugacuagcccgaugggccucccaacgggcccuccuccccuccuugcaccgagauuaauaaaaaaaaaaaaaaaaaaaaaaaaaaaaaaaaaaaaaaaaaaaaaaaaaaaaaaaaaaaaaaaaugcaucccccccccccccccccccccccccccccccaaaggcucuuuucagagccaccagaauu

SEQ ID NO: 917 - RNA, 865 nt, Artificial Sequence
  Ipilimumab backbone Rituximab LC without signale peptide
gggagaaagcuuaccgagaucgugcugacccagagccccggcacccucucccugagcccgggggagcgcgccacgcuguccugccgggccagccaguccgucggcagcuccuaccucgcgugguaccagcagaagcccgggcaggcgccccgccugcugaucuacggcgccuucagccgggccaccgggauccccgaccgcuucuccggcagcggcuccgggaccgacuucacccucacgaucagccggcuggagccggaggacuucgccguguacuacugccagcaguacggcuccagccccuggaccuucgggcagggcaccaagguggagaucaagcgcaccguggcggcccccagcguguucaucuucccgcccagcgacgagcagcugaagagcgggaccgccucggucgugugccuccugaacaacuucuacccccgggaggccaaggugcaguggaaggucgacaacgcgcugcagagcggcaacagccaggagagcgugacggagcaggacagcaaggacagcaccuacucgcucagcagcacccugacccugagcaaggccgacuacgagaagcacaagguguacgccugcgaggucacgcaccaggggcucagcucgcccgugaccaagagcuucaaccgcggggagugcugaggacuaguuauaagacugacuagcccgaugggccucccaacgggcccuccuccccuccuugcaccgagauuaauaaaaaaaaaaaaaaaaaaaaaaaaaaaaaaaaaaaaaaaaaaaaaaaaaaaaaaaaaaaaaaaaugcaucccccccccccccccccccccccccccccccaaaggcucuuuucagagccaccagaauu

SEQ ID NO: 918 - RNA, 865 nt, Artificial Sequence
  Ipilimumab backbone Rituximab LC without signale peptide
gggagaaagcuuaccgagaucgugcugacccagagccccggcacacucucccuuucuccuggggaaagagccacucugucaugcagggcuagucaaagcgucggauccucuuacuuggcaugguaucagcagaagccaggucaggccccgcgguuacugauuuacggcgcguucucgcgcgcuacggggauacccgaccgauuuucaggaagcggcagugguaccgauuucacacuaacuaucucccgucucgagccugaagacuuugccguuuauuacugucaacaguaugggucuagcccauggaccuucggacagggcacaaaaguggagauuaagagaaccguggcggcccccagcguguucaucuucccgcccagcgacgagcagcugaagagcgggaccgccucggucgugugccuccugaacaacuucuacccccgggaggccaaggugcaguggaaggucgacaacgcgcugcagagcggcaacagccaggagagcgugacggagcaggacagcaaggacagcaccuacucgcucagcagcacccugacccugagcaaggccgacuacgagaagcacaagguguacgccugcgaggucacgcaccaggggcucagcucgcccgugaccaagagcuucaaccgcggugagugcugaggacuaguuauaagacugacuagcccgaugggccucccaacgggcccuccuccccuccuugcaccgagauuaauaaaaaaaaaaaaaaaaaaaaaaaaaaaaaaaaaaaaaaaaaaaaaaaaaaaaaaaaaaaaaaaaugcaucccccccccccccccccccccccccccccccaaaggcucuuuucagagccaccagaauu

SEQ ID NO: 919 - RNA, 865 nt, Artificial Sequence
  Ipilimumab backbone Rituximab LC without signale peptide
gggagaaagcuuaccgagaucgugcugacccagagccccggcacccugagccugagccccggcgagagagccacccugagcugcagagccagccagagcgugggcagcagcuaccuggccugguaccagcagaagcccggccaggcccccagacugcugaucuacggcgccuucagcagagccaccggcauccccgacagauucagcggcagcggcagcggcaccgacuucacccugaccaucagcagacuggagcccgaggacuucgccguguacuacugccagcaguacggcagcagccccuggaccuucggccagggcaccaagguggagaucaagagaaccguggcggcccccagcguguucaucuucccgcccagcgacgagcagcugaagagcgggaccgccucggucgugugccuccugaacaacuucuacccccgggaggccaaggugcaguggaaggucgacaacgcgcugcagagcggcaacagccaggagagcgugacggagcaggacagcaaggacagcaccuacucgcucagcagcacccugacccugagcaaggccgacuacgagaagcacaagguguacgccugcgaggucacgcaccaggggcucagcucgcccgugaccaagagcuucaaccgcggcgagugcugaggacuaguuauaagacugacuagcccgaugggccucccaacgggcccuccuccccuccuugcaccgagauuaauaaaaaaaaaaaaaaaaaaaaaaaaaaaaaaaaaaaaaaaaaaaaaaaaaaaaaaaaaaaaaaaaugcaucccccccccccccccccccccccccccccccaaaggcucuuuucagagccaccagaauu

SEQ ID NO: 920 - RNA, 3008 nt, Artificial Sequence
  Ipilimumab opt1 IRES construct
gggagaaagcuuaccauggagcugggccucagcuggaucuuccugcuggccauccucaagggggugcagugccaggugcagcuggucgagagcggcgggggcguggugcagcccgggcgcucccuccggcugagcugcgccgccuccggcuucaccuucagcuccuacaccaugcacuggguccgccaggcgccggggaagggccuggagugggugacguucaucagcuacgacggcaacaacaaguacuacgccgacuccgugaaggggcgguucaccaucagccgcgacaacuccaagaacacccucuaccugcagaugaacagccugcgggccgaggacaccgccaucuacuacugcgcccgcacgggcuggcucgggcccuucgacuacuggggccaggggacccuggucaccguguccagcgcguccaccaagggccccagcguguucccccuggccccguccagcaaguccacgagcggcgggaccgccgcccucggcugccuggucaaggacuacuuccccgagcccgugaccguguccuggaacagcggggcgcugaccagcggcguccacacguuccccgccgugcuccaguccagcggccuguacucccugagcuccguggucaccgugccgagcuccagccucgggacccagaccuacaucugcaacgugaaccacaagcccuccaacacgaaggucgacaagcggguggagcccaagagcugcgacaagacccacacgugcccgcccugccccgcccccgagcugcugggcgggcccuccguguuccucuucccgcccaagcccaaggacacccugaugaucagccgcacccccgaggugaccugcgucguggucgacgugucccacgaggacccggaggucaaguucaacugguacguggacggcguggagguccacaacgccaagaccaagccccgggaggagcaguacaacagcaccuaccgcgugguguccguccugacggugcuccaccaggacuggcugaacgggaaggaguacaagugcaaggugagcaacaaggcccugcccgcgcccaucgagaagaccaucuccaaggccaagggccagccgcgggagccccaggucuacacccucccgcccagccgcgacgagcugaccaagaaccaggugucccugacgugccucgugaagggcuucuaccccagcgacaucgccgucgagugggagagcaacgggcagcccgagaacaacuacaagaccacgcccccggugcuggacuccgacggcagcuucuuccuguacuccaagcucaccguggacaagagccgguggcagcaggggaacgucuucuccugcagcgugaugcacgaggcccugcacaaccacuacacccagaagucccugagccucucccccggcaagugaccaugcauuugaaagccgggggugggagauccggauugccagucugcucgauaucgcaggcuggguccgugacuacccacucccccuuuaauuccgccccucucccuccccccccccuaacguuacuggccgaagccgcuuggaauaaggccggugugcguuugucuauauguuauuuuccaccauauugccgucuuuuggcaaugugagggcccggaaaccuggcccugucuucuugacgagcauuccuaggggucuuuccccucucgccaaaggaaugcaaggucuguugaaugucgugaaggaagcaguuccucuggaagcuucuugaagacaaacaacgucuguagcgacccuuugcaggcagcggaaccccccaccuggcgacaggugccucugcggccaaaagccacguguauaagauacaccugcaaaggcggcacaaccccagugccacguugugaguuggauaguuguggaaagagucaaauggcucuccucaagcguauucaacaaggggcugaaggaugcccagaagguaccccauuguaugggaucugaucuggggccucggugcacaugcuuuacguguguuuagucgagguuaaaaaacgucuaggccccccgaaccacggggacgugguuuuccuuugaaaaacacgaugauaauagaucuaccauggagacccccgcccagcugcucuuccugcugcuccuguggcugccggacaccacgggcgagaucgugcugacccagagccccggcacccucucccugagcccgggggagcgcgccacgcuguccugccgggccagccaguccgucggcagcuccuaccucgcgugguaccagcagaagcccgggcaggcgccccgccugcugaucuacggcgccuucagccgggccaccgggauccccgaccgcuucuccggcagcggcuccgggaccgacuucacccucacgaucagccggcuggagccggaggacuucgccguguacuacugccagcaguacggcuccagccccuggaccuucgggcagggcaccaagguggagaucaagcgcaccgucgccgcccccuccguguucaucuucccgcccagcgacgagcagcugaaguccgggacggccagcguggucugccuccugaacaacuucuacccccgggaggccaaggugcaguggaagguggacaacgcgcugcaguccggcaacagccaggagagcgucaccgagcaggacuccaaggacagcaccuacucccucagcuccacccugacgcugagcaaggccgacuacgagaagcacaagguguacgccugcgaggugacccaccagggccucuccagccccgucaccaaguccuucaaccgcggggagugcugaggacuaguuauaagacugacuagcccgaugggccucccaacgggcccuccuccccuccuugcaccgagauuaauaaaaaaaaaaaaaaaaaaaaaaaaaaaaaaaaaaaaaaaaaaaaaaaaaaaaaaaaaaaaaaaaugcaucccccccccccccccccccccccccccccccaaaggcucuuuucagagccaccagaauu

SEQ ID NO: 921 - RNA, 3008 nt, Artificial Sequence
  Ipilimumab opt3 IRES construct
gggagaaagcuuaccauggagcugggccucagcuggaucuuccuucuggccauuuugaagggggugcagugccaaguccaguuaguugaauccggagguggcgugguacagcccgggagaucucugaggcuaucaugugcugcaaguggauuuaccuucagcuccuacacaaugcacugggugcggcaggccccuggcaaaggucucgagugggucacuuuuauaucuuaugacgggaacaauaaguacuaugcggauucggugaaaggacgcuucacgaucucacgagacaacagcaagaauacccuguaccuucaaaugaacagucugcgugcugaagauacagccauuuauuacugcgcaagaacuggcugguugggcccauuugacuauugggggcagggaacccucguuacaguguccucugccagcaccaaagguccguccgucuucccccuggcuccuucaaguaagagcacuucuggcgggacagcagcccugggaugucucgugaaggauuacuuuccagagcccguaaccguuuccuggaacucaggcgcuuuaacgagcggugugcauacuuucccugccguccugcagaguucugggcuuuacuccuugagcucgguggugaccgucccaucuuccucacugggaacacagacuuauaucugcaauguuaaucacaaacccaguaacaccaagguggacaaaaggguagaaccuaagagcugugauaaaacacauaccugcccaccgugucccgcgccugagcuacucggcggcccauccguguuucuguuucccccuaagccaaaggacacgcuuaugauuucucggacucccgaggucacaugcgugguuguggaugucagccacgaagacccggaggugaaauuuaauugguacguagaugggguugaagugcauaacgcaaagaccaaaccucgcgaggagcaauauaauucaacuuacagagucgugaguguccugacaguguugcaccaggacuggcucaacggaaaggaauauaaauguaagguuuccaauaaagcccugcccgcuccaaucgagaagaccauaagcaaggccaaaggucagccuagggaaccccagguguacacguuaccacccucucgggaugagcugaccaagaaccaaguaucacucacaugccuugucaaaggcuucuauccuagugacaucgcaguggaaugggagagcaaugggcagccagagaacaacuacaagacuaccccgcccguucuggacuccgauggaucuuucuucuuguacucgaaacuaacaguggacaagagccgcuggcagcaaggcaaugucuucuccuguucagugaugcacgaagcucugcauaaccacuauacucagaagagucucucucugagcccugguaaaugaccaugcauuugaaagccgggggugggagauccggauugccagucugcucgauaucgcaggcuggguccgugacuacccacucccccuuuaauuccgccccucucccuccccccccccuaacguuacuggccgaagccgcuuggaauaaggccggugugcguuugucuauauguuauuuuccaccauauugccgucuuuuggcaaugugagggcccggaaaccuggcccugucuucuugacgagcauuccuaggggucuuuccccucucgccaaaggaaugcaaggucuguugaaugucgugaaggaagcaguuccucuggaagcuucuugaagacaaacaacgucuguagcgacccuuugcaggcagcggaaccccccaccuggcgacaggugccucugcggccaaaagccacguguauaagauacaccugcaaaggcggcacaaccccagugccacguugugaguuggauaguuguggaaagagucaaauggcucuccucaagcguauucaacaaggggcugaaggaugcccagaagguaccccauuguaugggaucugaucuggggccucggugcacaugcuuuacguguguuuagucgagguuaaaaaacgucuaggccccccgaaccacggggacgugguuuuccuuugaaaaacacgaugauaauagaucuaccauggagacccccgcccagcuucucuuccuucuguuguuauggcugccugacacaacuggcgaaaucgugcuaacgcaaagcccagggacccucucccugucuccgggagagagagcuacacuuucaugcagggcaagucagagcgucgguuccucuuaccuggccugguaucagcagaagcccggccaagcgccucgguugcucauuuacggggcuuuuucgcgcgccacuggaauaccagaucgauucucaggcagcgguagugggaccgacuuuacacugaccaucucccgucuggaacccgaggauuucgcaguuuauuacugucagcaguauggaucuagcccuuggacuuuuggccagggcacaaaaguggaaauuaagagaaccguagccgcuccauccguguucaucuuucccccuucagacgagcaacucaaaagugggacggcaagcgucgugugcuuacugaacaauuucuacccaagggaggccaagguucaguggaaaguggauaacgcucugcagucuggaaauucccaggaaucagucacugagcaagacagcaaggauaguaccuauucuuuguccagcacacugacucuaucgaaggccgacuacgaaaaacacaagguguacgcgugugagguaacccaucagggucucucuuccccgguuacaaaaucauuuaaccggggcgagugcugaggacuaguuauaagacugacuagcccgaugggccucccaacgggcccuccuccccuccuugcaccgagauuaauaaaaaaaaaaaaaaaaaaaaaaaaaaaaaaaaaaaaaaaaaaaaaaaaaaaaaaaaaaaaaaaaugcaucccccccccccccccccccccccccccccccaaaggcucuuuucagagccaccagaauu

SEQ ID NO: 922 - RNA, 3008 nt, Artificial Sequence
  Ipilimumab opt4 IRES construct
gggagaaagcuuaccauggagcugggccugagcuggaucuuccugcuggccauccugaagggcgugcagugccaggugcagcugguggagagcggcggcggcguggugcagcccggcagaagccugagacugagcugcgccgccagcggcuucaccuucagcagcuacaccaugcacugggugagacaggcccccggcaagggccuggagugggugaccuucaucagcuacgacggcaacaacaaguacuacgccgacagcgugaagggcagauucaccaucagcagagacaacagcaagaacacccuguaccugcagaugaacagccugagagccgaggacaccgccaucuacuacugcgccagaaccggcuggcugggccccuucgacuacuggggccagggcacccuggugaccgugagcagcgccagcaccaagggccccagcguguucccccuggcccccagcagcaagagcaccagcggcggcaccgccgcccugggcugccuggugaaggacuacuuccccgagcccgugaccgugagcuggaacagcggcgcccugaccagcggcgugcacaccuuccccgccgugcugcagagcagcggccuguacagccugagcagcguggugaccgugcccagcagcagccugggcacccagaccuacaucugcaacgugaaccacaagcccagcaacaccaagguggacaagagaguggagcccaagagcugcgacaagacccacaccugcccccccugccccgcccccgagcugcugggcggccccagcguguuccuguucccccccaagcccaaggacacccugaugaucagcagaacccccgaggugaccugcguggugguggacgugagccacgaggaccccgaggugaaguucaacugguacguggacggcguggaggugcacaacgccaagaccaagcccagagaggagcaguacaacagcaccuacagaguggugagcgugcugaccgugcugcaccaggacuggcugaacggcaaggaguacaagugcaaggugagcaacaaggcccugcccgcccccaucgagaagaccaucagcaaggccaagggccagcccagagagccccagguguacacccugccccccagcagagacgagcugaccaagaaccaggugagccugaccugccuggugaagggcuucuaccccagcgacaucgccguggagugggagagcaacggccagcccgagaacaacuacaagaccaccccccccgugcuggacagcgacggcagcuucuuccuguacagcaagcugaccguggacaagagcagauggcagcagggcaacguguucagcugcagcgugaugcacgaggcccugcacaaccacuacacccagaagagccugagccugagccccggcaagugaccaugcauuugaaagccgggggugggagauccggauugccagucugcucgauaucgcaggcuggguccgugacuacccacucccccuuuaauuccgccccucucccuccccccccccuaacguuacuggccgaagccgcuuggaauaaggccggugugcguuugucuauauguuauuuuccaccauauugccgucuuuuggcaaugugagggcccggaaaccuggcccugucuucuugacgagcauuccuaggggucuuuccccucucgccaaaggaaugcaaggucuguugaaugucgugaaggaagcaguuccucuggaagcuucuugaagacaaacaacgucuguagcgacccuuugcaggcagcggaaccccccaccuggcgacaggugccucugcggccaaaagccacguguauaagauacaccugcaaaggcggcacaaccccagugccacguugugaguuggauaguuguggaaagagucaaauggcucuccucaagcguauucaacaaggggcugaaggaugcccagaagguaccccauuguaugggaucugaucuggggccucggugcacaugcuuuacguguguuuagucgagguuaaaaaacgucuaggccccccgaaccacggggacgugguuuuccuuugaaaaacacgaugauaauagaucuaccauggagacccccgcccagcugcuguuccugcugcugcuguggcugcccgacaccaccggcgagaucgugcugacccagagccccggcacccugagccugagccccggcgagagagccacccugagcugcagagccagccagagcgugggcagcagcuaccuggccugguaccagcagaagcccggccaggcccccagacugcugaucuacggcgccuucagcagagccaccggcauccccgacagauucagcggcagcggcagcggcaccgacuucacccugaccaucagcagacuggagcccgaggacuucgccguguacuacugccagcaguacggcagcagccccuggaccuucggccagggcaccaagguggagaucaagagaaccguggccgcccccagcguguucaucuucccccccagcgacgagcagcugaagagcggcaccgccagcguggugugccugcugaacaacuucuaccccagagaggccaaggugcaguggaagguggacaacgcccugcagagcggcaacagccaggagagcgugaccgagcaggacagcaaggacagcaccuacagccugagcagcacccugacccugagcaaggccgacuacgagaagcacaagguguacgccugcgaggugacccaccagggccugagcagccccgugaccaagagcuucaacagaggcgagugcugaggacuaguuauaagacugacuagcccgaugggccucccaacgggcccuccuccccuccuugcaccgagauuaauaaaaaaaaaaaaaaaaaaaaaaaaaaaaaaaaaaaaaaaaaaaaaaaaaaaaaaaaaaaaaaaaugcaucccccccccccccccccccccccccccccccaaaggcucuuuucagagccaccagaauu

SEQ ID NO: 923 - RNA, 2392 nt, Artificial Sequence
  Ipilimumab opt1 F2A construct
gggagaaagcuuaccauggagcugggccucagcuggaucuuccugcuggccauccucaagggggugcagugccaggugcagcuggucgagagcggcgggggcguggugcagcccgggcgcucccuccggcugagcugcgccgccuccggcuucaccuucagcuccuacaccaugcacuggguccgccaggcgccggggaagggccuggagugggugacguucaucagcuacgacggcaacaacaaguacuacgccgacuccgugaaggggcgguucaccaucagccgcgacaacuccaagaacacccucuaccugcagaugaacagccugcgggccgaggacaccgccaucuacuacugcgcccgcacgggcuggcucgggcccuucgacuacuggggccaggggacccuggucaccguguccagcgcguccaccaagggccccagcguguucccccuggccccguccagcaaguccacgagcggcgggaccgccgcccucggcugccuggucaaggacuacuuccccgagcccgugaccguguccuggaacagcggggcgcugaccagcggcguccacacguuccccgccgugcuccaguccagcggccuguacucccugagcuccguggucaccgugccgagcuccagccucgggacccagaccuacaucugcaacgugaaccacaagcccuccaacacgaaggucgacaagcggguggagcccaagagcugcgacaagacccacacgugcccgcccugccccgcccccgagcugcugggcgggcccuccguguuccucuucccgcccaagcccaaggacacccugaugaucagccgcacccccgaggugaccugcgucguggucgacgugucccacgaggacccggaggucaaguucaacugguacguggacggcguggagguccacaacgccaagaccaagccccgggaggagcaguacaacagcaccuaccgcgugguguccguccugacggugcuccaccaggacuggcugaacgggaaggaguacaagugcaaggugagcaacaaggcccugcccgcgcccaucgagaagaccaucuccaaggccaagggccagccgcgggagccccaggucuacacccucccgcccagccgcgacgagcugaccaagaaccaggugucccugacgugccucgugaagggcuucuaccccagcgacaucgccgucgagugggagagcaacgggcagcccgagaacaacuacaagaccacgcccccggugcuggacuccgacggcagcuucuuccuguacuccaagcucaccguggacaagagccgguggcagcaggggaacgucuucuccugcagcgugaugcacgaggcccugcacaaccacuacacccagaagucccugagccucucccccggcaaggugaagcagacacucaauuucgaccuucugaaguuggcuggagauguugagucuaacccaggccccauggagacccccgcccagcugcucuuccugcugcuccuguggcugccggacaccacgggcgagaucgugcugacccagagccccggcacccucucccugagcccgggggagcgcgccacgcuguccugccgggccagccaguccgucggcagcuccuaccucgcgugguaccagcagaagcccgggcaggcgccccgccugcugaucuacggcgccuucagccgggccaccgggauccccgaccgcuucuccggcagcggcuccgggaccgacuucacccucacgaucagccggcuggagccggaggacuucgccguguacuacugccagcaguacggcuccagccccuggaccuucgggcagggcaccaagguggagaucaagcgcaccgucgccgcccccuccguguucaucuucccgcccagcgacgagcagcugaaguccgggacggccagcguggucugccuccugaacaacuucuacccccgggaggccaaggugcaguggaagguggacaacgcgcugcaguccggcaacagccaggagagcgucaccgagcaggacuccaaggacagcaccuacucccucagcuccacccugacgcugagcaaggccgacuacgagaagcacaagguguacgccugcgaggugacccaccagggccucuccagccccgucaccaaguccuucaaccgcggggagugcugaggacuaguuauaagacugacuagcccgaugggccucccaacgggcccuccuccccuccuugcaccgagauuaauaaaaaaaaaaaaaaaaaaaaaaaaaaaaaaaaaaaaaaaaaaaaaaaaaaaaaaaaaaaaaaaaugcaucccccccccccccccccccccccccccccccaaaggcucuuuucagagccaccagaauu

SEQ ID NO: 924 - RNA, 2392 nt, Artificial Sequence
  Ipilimumab opt3 F2A construct
gggagaaagcuuaccauggagcugggccucagcuggaucuuccuucuggccauuuugaagggggugcagugccaaguccaguuaguugaauccggagguggcgugguacagcccgggagaucucugaggcuaucaugugcugcaaguggauuuaccuucagcuccuacacaaugcacugggugcggcaggccccuggcaaaggucucgagugggucacuuuuauaucuuaugacgggaacaauaaguacuaugcggauucggugaaaggacgcuucacgaucucacgagacaacagcaagaauacccuguaccuucaaaugaacagucugcgugcugaagauacagccauuuauuacugcgcaagaacuggcugguugggcccauuugacuauugggggcagggaacccucguuacaguguccucugccagcaccaaagguccguccgucuucccccuggcuccuucaaguaagagcacuucuggcgggacagcagcccugggaugucucgugaaggauuacuuuccagagcccguaaccguuuccuggaacucaggcgcuuuaacgagcggugugcauacuuucccugccguccugcagaguucugggcuuuacuccuugagcucgguggugaccgucccaucuuccucacugggaacacagacuuauaucugcaauguuaaucacaaacccaguaacaccaagguggacaaaaggguagaaccuaagagcugugauaaaacacauaccugcccaccgugucccgcgccugagcuacucggcggcccauccguguuucuguuucccccuaagccaaaggacacgcuuaugauuucucggacucccgaggucacaugcgugguuguggaugucagccacgaagacccggaggugaaauuuaauugguacguagaugggguugaagugcauaacgcaaagaccaaaccucgcgaggagcaauauaauucaacuuacagagucgugaguguccugacaguguugcaccaggacuggcucaacggaaaggaauauaaauguaagguuuccaauaaagcccugcccgcuccaaucgagaagaccauaagcaaggccaaaggucagccuagggaaccccagguguacacguuaccacccucucgggaugagcugaccaagaaccaaguaucacucacaugccuugucaaaggcuucuauccuagugacaucgcaguggaaugggagagcaaugggcagccagagaacaacuacaagacuaccccgcccguucuggacuccgauggaucuuucuucuuguacucgaaacuaacaguggacaagagccgcuggcagcaaggcaaugucuucuccuguucagugaugcacgaagcucugcauaaccacuauacucagaagagucucucucugagcccugguaaagugaagcagacacucaauuucgaccuucugaaguuggcuggagauguugagucuaacccaggccccauggagacccccgcccagcuucucuuccuucuguuguuauggcugccugacacaacuggcgaaaucgugcuaacgcaaagcccagggacccucucccugucuccgggagagagagcuacacuuucaugcagggcaagucagagcgucgguuccucuuaccuggccugguaucagcagaagcccggccaagcgccucgguugcucauuuacggggcuuuuucgcgcgccacuggaauaccagaucgauucucaggcagcgguagugggaccgacuuuacacugaccaucucccgucuggaacccgaggauuucgcaguuuauuacugucagcaguauggaucuagcccuuggacuuuuggccagggcacaaaaguggaaauuaagagaaccguagccgcuccauccguguucaucuuucccccuucagacgagcaacucaaaagugggacggcaagcgucgugugcuuacugaacaauuucuacccaagggaggccaagguucaguggaaaguggauaacgcucugcagucuggaaauucccaggaaucagucacugagcaagacagcaaggauaguaccuauucuuuguccagcacacugacucuaucgaaggccgacuacgaaaaacacaagguguacgcgugugagguaacccaucagggucucucuuccccgguuacaaaaucauuuaaccggggcgagugcugaggacuaguuauaagacugacuagcccgaugggccucccaacgggcccuccuccccuccuugcaccgagauuaauaaaaaaaaaaaaaaaaaaaaaaaaaaaaaaaaaaaaaaaaaaaaaaaaaaaaaaaaaaaaaaaaugcaucccccccccccccccccccccccccccccccaaaggcucuuuucagagccaccagaauu

SEQ ID NO: 925 - RNA, 2392 nt, Artificial Sequence
  Ipilimumab opt4 F2A construct
gggagaaagcuuaccauggagcugggccugagcuggaucuuccugcuggccauccugaagggcgugcagugccaggugcagcugguggagagcggcggcggcguggugcagcccggcagaagccugagacugagcugcgccgccagcggcuucaccuucagcagcuacaccaugcacugggugagacaggcccccggcaagggccuggagugggugaccuucaucagcuacgacggcaacaacaaguacuacgccgacagcgugaagggcagauucaccaucagcagagacaacagcaagaacacccuguaccugcagaugaacagccugagagccgaggacaccgccaucuacuacugcgccagaaccggcuggcugggccccuucgacuacuggggccagggcacccuggugaccgugagcagcgccagcaccaagggccccagcguguucccccuggcccccagcagcaagagcaccagcggcggcaccgccgcccugggcugccuggugaaggacuacuuccccgagcccgugaccgugagcuggaacagcggcgcccugaccagcggcgugcacaccuuccccgccgugcugcagagcagcggccuguacagccugagcagcguggugaccgugcccagcagcagccugggcacccagaccuacaucugcaacgugaaccacaagcccagcaacaccaagguggacaagagaguggagcccaagagcugcgacaagacccacaccugcccccccugccccgcccccgagcugcugggcggccccagcguguuccuguucccccccaagcccaaggacacccugaugaucagcagaacccccgaggugaccugcguggugguggacgugagccacgaggaccccgaggugaaguucaacugguacguggacggcguggaggugcacaacgccaagaccaagcccagagaggagcaguacaacagcaccuacagaguggugagcgugcugaccgugcugcaccaggacuggcugaacggcaaggaguacaagugcaaggugagcaacaaggcccugcccgcccccaucgagaagaccaucagcaaggccaagggccagcccagagagccccagguguacacccugccccccagcagagacgagcugaccaagaaccaggugagccugaccugccuggugaagggcuucuaccccagcgacaucgccguggagugggagagcaacggccagcccgagaacaacuacaagaccaccccccccgugcuggacagcgacggcagcuucuuccuguacagcaagcugaccguggacaagagcagauggcagcagggcaacguguucagcugcagcgugaugcacgaggcccugcacaaccacuacacccagaagagccugagccugagccccggcaaggugaagcagacacucaauuucgaccuucugaaguuggcuggagauguugagucuaacccaggccccauggagacccccgcccagcugcuguuccugcugcugcuguggcugcccgacaccaccggcgagaucgugcugacccagagccccggcacccugagccugagccccggcgagagagccacccugagcugcagagccagccagagcgugggcagcagcuaccuggccugguaccagcagaagcccggccaggcccccagacugcugaucuacggcgccuucagcagagccaccggcauccccgacagauucagcggcagcggcagcggcaccgacuucacccugaccaucagcagacuggagcccgaggacuucgccguguacuacugccagcaguacggcagcagccccuggaccuucggccagggcaccaagguggagaucaagagaaccguggccgcccccagcguguucaucuucccccccagcgacgagcagcugaagagcggcaccgccagcguggugugccugcugaacaacuucuaccccagagaggccaaggugcaguggaagguggacaacgcccugcagagcggcaacagccaggagagcgugaccgagcaggacagcaaggacagcaccuacagccugagcagcacccugacccugagcaaggccgacuacgagaagcacaagguguacgccugcgaggugacccaccagggccugagcagccccgugaccaagagcuucaacagaggcgagugcugaggacuaguuauaagacugacuagcccgaugggccucccaacgggcccuccuccccuccuugcaccgagauuaauaaaaaaaaaaaaaaaaaaaaaaaaaaaaaaaaaaaaaaaaaaaaaaaaaaaaaaaaaaaaaaaaugcaucccccccccccccccccccccccccccccccaaaggcucuuuucagagccaccagaauu

SEQ ID NO: 926 - RNA, 1621 nt, Artificial Sequence; identical to SEQ ID NO: 594
  Ipilimumab HC with signale peptide

SEQ ID NO: 927 - RNA, 1621 nt, Artificial Sequence; identical to SEQ ID NO: 861
  Ipilimumab HC with signale peptide

SEQ ID NO: 928 - RNA, 1621 nt, Artificial Sequence; identical to SEQ ID NO: 862
  Ipilimumab HC with signale peptide

SEQ ID NO: 929 - RNA, 1621 nt, Artificial Sequence; identical to SEQ ID NO: 863
  Ipilimumab HC with signale peptide

SEQ ID NO: 930 - RNA, 1621 nt, Artificial Sequence; identical to SEQ ID NO: 864
  Ipilimumab HC with signale peptide

SEQ ID NO: 931 - RNA, 1621 nt, Artificial Sequence; identical to SEQ ID NO: 865
  Ipilimumab HC with signale peptide

SEQ ID NO: 932 - RNA, 1621 nt, Artificial Sequence; identical to SEQ ID NO: 866
  Ipilimumab HC with signale peptide

SEQ ID NO: 933 - RNA, 1621 nt, Artificial Sequence; identical to SEQ ID NO: 867
  Ipilimumab HC with signale peptide

SEQ ID NO: 934 - RNA, 1621 nt, Artificial Sequence; identical to SEQ ID NO: 868
  Ipilimumab HC with signale peptide

SEQ ID NO: 935 - RNA, 1621 nt, Artificial Sequence; identical to SEQ ID NO: 869
  Ipilimumab HC with signale peptide

SEQ ID NO: 936 - RNA, 1621 nt, Artificial Sequence; identical to SEQ ID NO: 870
  Ipilimumab HC with signale peptide

SEQ ID NO: 937 - RNA, 1621 nt, Artificial Sequence; identical to SEQ ID NO: 871
  Ipilimumab HC with signale peptide

SEQ ID NO: 938 - RNA, 1621 nt, Artificial Sequence; identical to SEQ ID NO: 872
  Ipilimumab backbone Rituximab HC with signale peptide

SEQ ID NO: 939 - RNA, 1621 nt, Artificial Sequence; identical to SEQ ID NO: 873
  Ipilimumab backbone Rituximab HC with signale peptide

SEQ ID NO: 940 - RNA, 1621 nt, Artificial Sequence; identical to SEQ ID NO: 874
  Ipilimumab backbone Rituximab HC with signale peptide

SEQ ID NO: 941 - RNA, 1564 nt, Artificial Sequence; identical to SEQ ID NO: 875
  Ipilimumab HC without signale peptide

SEQ ID NO: 942 - RNA, 1564 nt, Artificial Sequence; identical to SEQ ID NO: 876
  Ipilimumab HC without signale peptide

SEQ ID NO: 943 - RNA, 1564 nt, Artificial Sequence; identical to SEQ ID NO: 877
  Ipilimumab HC without signale peptide

SEQ ID NO: 944 - RNA, 1564 nt, Artificial Sequence; identical to SEQ ID NO: 878
  Ipilimumab HC without signale peptide

SEQ ID NO: 945 - RNA, 1564 nt, Artificial Sequence; identical to SEQ ID NO: 879
  Ipilimumab HC without signale peptide

SEQ ID NO: 946 - RNA, 1564 nt, Artificial Sequence; identical to SEQ ID NO: 880
  Ipilimumab HC without signale peptide

SEQ ID NO: 947 - RNA, 1564 nt, Artificial Sequence; identical to SEQ ID NO: 881
  Ipilimumab HC without signale peptide

SEQ ID NO: 948 - RNA, 1564 nt, Artificial Sequence; identical to SEQ ID NO: 882
  Ipilimumab HC without signale peptide

SEQ ID NO: 949 - RNA, 1564 nt, Artificial Sequence; identical to SEQ ID NO: 883
  Ipilimumab HC without signale peptide

SEQ ID NO: 950 - RNA, 1564 nt, Artificial Sequence; identical to SEQ ID NO: 884
  Ipilimumab HC without signale peptide

SEQ ID NO: 951 - RNA, 1564 nt, Artificial Sequence; identical to SEQ ID NO: 885
  Ipilimumab HC without signale peptide

SEQ ID NO: 952 - RNA, 1564 nt, Artificial Sequence; identical to SEQ ID NO: 886
  Ipilimumab HC without signale peptide

SEQ ID NO: 953 - RNA, 1564 nt, Artificial Sequence; identical to SEQ ID NO: 887
  Ipilimumab backbone Rituximab HC without signale peptide

SEQ ID NO: 954 - RNA, 1564 nt, Artificial Sequence; identical to SEQ ID NO: 888
  Ipilimumab backbone Rituximab HC without signale peptide

SEQ ID NO: 955 - RNA, 1564 nt, Artificial Sequence; identical to SEQ ID NO: 889
  Ipilimumab backbone Rituximab HC without signale peptide

SEQ ID NO: 956 - RNA, 925 nt, Artificial Sequence; identical to SEQ ID NO: 595
  Ipilimumab LC with signale peptide

SEQ ID NO: 957 - RNA, 925 nt, Artificial Sequence; identical to SEQ ID NO: 891
  Ipilimumab LC with signale peptide

SEQ ID NO: 958 - RNA, 925 nt, Artificial Sequence; identical to SEQ ID NO: 892
  Ipilimumab LC with signale peptide

SEQ ID NO: 959 - RNA, 925 nt, Artificial Sequence; identical to SEQ ID NO: 893
  Ipilimumab LC with signale peptide

SEQ ID NO: 960 - RNA, 925 nt, Artificial Sequence; identical to SEQ ID NO: 894
  Ipilimumab LC with signale peptide

SEQ ID NO: 961 - RNA, 925 nt, Artificial Sequence; identical to SEQ ID NO: 895
  Ipilimumab LC with signale peptide

SEQ ID NO: 962 - RNA, 925 nt, Artificial Sequence; identical to SEQ ID NO: 896
  Ipilimumab LC with signale peptide

SEQ ID NO: 963 - RNA, 925 nt, Artificial Sequence; identical to SEQ ID NO: 897
  Ipilimumab LC with signale peptide

SEQ ID NO: 964 - RNA, 925 nt, Artificial Sequence; identical to SEQ ID NO: 898
  Ipilimumab LC with signale peptide

SEQ ID NO: 965 - RNA, 925 nt, Artificial Sequence; identical to SEQ ID NO: 899
  Ipilimumab LC with signale peptide

SEQ ID NO: 966 - RNA, 925 nt, Artificial Sequence; identical to SEQ ID NO: 900
  Ipilimumab LC with signale peptide

SEQ ID NO: 967 - RNA, 925 nt, Artificial Sequence; identical to SEQ ID NO: 901
  Ipilimumab LC with signale peptide

SEQ ID NO: 968 - RNA, 925 nt, Artificial Sequence; identical to SEQ ID NO: 902
  Ipilimumab backbone Rituximab LC with signale peptide

SEQ ID NO: 969 - RNA, 925 nt, Artificial Sequence; identical to SEQ ID NO: 903
  Ipilimumab backbone Rituximab LC with signale peptide

SEQ ID NO: 970 - RNA, 925 nt, Artificial Sequence; identical to SEQ ID NO: 904
  Ipilimumab backbone Rituximab LC with signale peptide

SEQ ID NO: 971 - RNA, 865 nt, Artificial Sequence; identical to SEQ ID NO: 905
  Ipilimumab LC without signale peptide

SEQ ID NO: 972 - RNA, 865 nt, Artificial Sequence; identical to SEQ ID NO: 906
  Ipilimumab LC without signale peptide

SEQ ID NO: 973 - RNA, 865 nt, Artificial Sequence; identical to SEQ ID NO: 907
  Ipilimumab LC without signale peptide

SEQ ID NO: 974 - RNA, 865 nt, Artificial Sequence; identical to SEQ ID NO: 908
  Ipilimumab LC without signale peptide

SEQ ID NO: 975 - RNA, 865 nt, Artificial Sequence; identical to SEQ ID NO: 909
  Ipilimumab LC without signale peptide

SEQ ID NO: 976 - RNA, 865 nt, Artificial Sequence; identical to SEQ ID NO: 910
  Ipilimumab LC without signale peptide

SEQ ID NO: 977 - RNA, 865 nt, Artificial Sequence; identical to SEQ ID NO: 911
  Ipilimumab LC without signale peptide

SEQ ID NO: 978 - RNA, 865 nt, Artificial Sequence; identical to SEQ ID NO: 912
  Ipilimumab LC without signale peptide

SEQ ID NO: 979 - RNA, 865 nt, Artificial Sequence; identical to SEQ ID NO: 913
  Ipilimumab LC without signale peptide

SEQ ID NO: 980 - RNA, 865 nt, Artificial Sequence; identical to SEQ ID NO: 914
  Ipilimumab LC without signale peptide

SEQ ID NO: 981 - RNA, 865 nt, Artificial Sequence; identical to SEQ ID NO: 915
  Ipilimumab LC without signale peptide

SEQ ID NO: 982 - RNA, 865 nt, Artificial Sequence; identical to SEQ ID NO: 916
  Ipilimumab LC without signale peptide

SEQ ID NO: 983 - RNA, 865 nt, Artificial Sequence; identical to SEQ ID NO: 917
  Ipilimumab backbone Rituximab LC without signale peptide

SEQ ID NO: 984 - RNA, 865 nt, Artificial Sequence; identical to SEQ ID NO: 918
  Ipilimumab backbone Rituximab LC without signale peptide

SEQ ID NO: 985 - RNA, 865 nt, Artificial Sequence; identical to SEQ ID NO: 919
  Ipilimumab backbone Rituximab LC without signale peptide

SEQ ID NO: 986 - RNA, 3008 nt, Artificial Sequence; identical to SEQ ID NO: 920
  Ipilimumab opt1 IRES construct

SEQ ID NO: 987 - RNA, 3008 nt, Artificial Sequence; identical to SEQ ID NO: 921
  Ipilimumab opt3 IRES construct

SEQ ID NO: 988 - RNA, 3008 nt, Artificial Sequence; identical to SEQ ID NO: 922
  Ipilimumab opt4 IRES construct

SEQ ID NO: 989 - RNA, 2392 nt, Artificial Sequence; identical to SEQ ID NO: 923
  Ipilimumab opt1 F2A construct

SEQ ID NO: 990 - RNA, 2392 nt, Artificial Sequence; identical to SEQ ID NO: 924
  Ipilimumab opt3 F2A construct

SEQ ID NO: 991 - RNA, 2392 nt, Artificial Sequence; identical to SEQ ID NO: 925
  Ipilimumab opt4 F2A construct

SEQ ID NO: 992 - RNA, 1849 nt, Artificial Sequence; identical to SEQ ID NO: 164
  IL12_opt1_gen4

SEQ ID NO: 993 - RNA, 2014 nt, Artificial Sequence; identical to SEQ ID NO: 296
  IL12_opt1_gen5

SEQ ID NO: 994 - RNA, 42 nt, Artificial Sequence; identical to SEQ ID NO: 409
  1368_5UTR

SEQ ID NO: 995 - RNA, 34 nt, Artificial Sequence
  1412_5UTR
ggagcgggcggcggcguuggcggcuugugcagca

SEQ ID NO: 996 - RNA, 34 nt, Artificial Sequence
  1413_5UTR
ggccggaaccgccaucuuccaguaauucgccaaa

SEQ ID NO: 997 - RNA, 75 nt, Artificial Sequence; identical to SEQ ID NO: 411
  1414_5UTR

SEQ ID NO: 998 - RNA, 62 nt, Artificial Sequence; identical to SEQ ID NO: 843
  1415_5UTR

SEQ ID NO: 999 - RNA, 31 nt, Artificial Sequence
  1416_5UTR
gccgcccagccgguccaggccucuggcgaac

SEQ ID NO: 1000 - RNA, 56 nt, Artificial Sequence
  1417_5UTR
agucaggaaggacguugguguugagguuagcauacguaucaaggacaguaacuacc

SEQ ID NO: 1001 - RNA, 42 nt, Artificial Sequence
  1418_5UTR
gccucugcuggaguccggggaguggcguuggcugcuagagcg

SEQ ID NO: 1002 - RNA, 34 nt, Artificial Sequence
  1419_5UTR
ggccgccgcagccaucuuccaguaacucgccaaa

SEQ ID NO: 1003 - RNA, 53 nt, Artificial Sequence
  1420_5UTR
gccaucuuggcgccuguggaggccugcugggaacaggacuucuaacagcaagu

SEQ ID NO: 1004 - DNA, 42 bp, Artificial Sequence; identical to SEQ ID NO: 408
  1368_5UTR

SEQ ID NO: 1005 - DNA, 34 bp, Artificial Sequence
  1412_5UTR
ggagcgggcggcggcgttggcggcttgtgcagca

SEQ ID NO: 1006 - DNA, 34 bp, Artificial Sequence
  1413_5UTR
ggccggaaccgccatcttccagtaattcgccaaa

SEQ ID NO: 1007 - DNA, 75 bp, Artificial Sequence; identical to SEQ ID NO: 410
  1414_5UTR

SEQ ID NO: 1008 - DNA, 62 bp, Artificial Sequence; identical to SEQ ID NO: 842
  1415_5UTR

SEQ ID NO: 1009 - DNA, 31 bp, Artificial Sequence
  1416_5UTR
gccgcccagccggtccaggcctctggcgaac

SEQ ID NO: 1010 - DNA, 56 bp, Artificial Sequence
  1417_5UTR
agtcaggaaggacgttggtgttgaggttagcatacgtatcaaggacagtaactacc

SEQ ID NO: 1011 - DNA, 42 bp, Artificial Sequence
  1418_5UTR
gcctctgctggagtccggggagtggcgttggctgctagagcg

SEQ ID NO: 1012 - DNA, 34 bp, Artificial Sequence
  1419_5UTR
ggccgccgcagccatcttccagtaactcgccaaa

SEQ ID NO: 1013 - DNA, 53 bp, Artificial Sequence
  1420_5UTR
gccatcttggcgcctgtggaggcctgctgggaacaggacttctaacagcaagt

SEQ ID NO: 1014 - RNA, 547 nt, Artificial Sequence
  R3630_(a249g)_Ndel
gggagaaagcucaagcuuauccaaguaggcuggucaccuguacaacguagccgguauuuuuuuuuuuuuuuuuuuuuugaccgucucaagguccaaguuagucugccuauaaaggugcggauccacagcugaugaaagacuugugcgguacgguuaaucuccccuuuuuuuuuuuuuuuuuuuuuaguaaaugcgucuacugaauccagcgaugaugcuggcccagaucuucgaccacaagugcauaugguagucaucgagggucgccuuuuuuuuuuuuuuuuuuuuuuuggcccaguucugagacuucgcuagagacuacaguuacagcugcaguaguaaccacugcggcuauugcaggaaaucccguucagguuuuuuuuuuuuuuuuuuuuuccgcucacuaugauuaagaaccagguggagugucacugcucucgaggucucacgagagcgcucgauacagugcuuggaagaaucuuuuuuuuuuuuuuuuuuuuuugugcgacgaucacagagaacuucuauucaugcaggucugcucuag

SEQ ID NO: 1015 - RNA, 547 nt, Artificial Sequence
  R3630_(g241a)_Nsil
gggagaaagcucaagcuuauccaaguaggcuggucaccuguacaacguagccgguauuuuuuuuuuuuuuuuuuuuuugaccgucucaagguccaaguuagucugccuauaaaggugcggauccacagcugaugaaagacuugugcgguacgguuaaucuccccuuuuuuuuuuuuuuuuuuuuuaguaaaugcgucuacugaauccagcgaugaugcuggcccagaucuucgaccacaaaugcauauaguagucaucgagggucgccuuuuuuuuuuuuuuuuuuuuuuuggcccaguucugagacuucgcuagagacuacaguuacagcugcaguaguaaccacugcggcuauugcaggaaaucccguucagguuuuuuuuuuuuuuuuuuuuuccgcucacuaugauuaagaaccagguggagugucacugcucucgaggucucacgagagcgcucgauacagugcuuggaagaaucuuuuuuuuuuuuuuuuuuuuuugugcgacgaucacagagaacuucuauucaugcaggucugcucuag

SEQ ID NO: 1016 - RNA, 547 nt, Artificial Sequence
  R3630_no_BglII
gggagaaagcucaagcuuauccaaguaggcuggucaccuguacaacguagccgguauuuuuuuuuuuuuuuuuuuuuugaccgucucaagguccaaguuagucugccuauaaaggugcggauccacagcugaugaaagacuugugcgguacgguuaaucuccccuuuuuuuuuuuuuuuuuuuuuaguaaaugcgucuacugaauccagcgaugaugcuggcccagaucaucgaccacaagugcauauaguagucaucgagggucgccuuuuuuuuuuuuuuuuuuuuuuuggcccaguucugagacuucgcuagagacuacaguuacagcugcaguaguaaccacugcggcuauugcaggaaaucccguucagguuuuuuuuuuuuuuuuuuuuuccgcucacuaugauuaagaaccagguggagugucacugcucucgaggucucacgagagcgcucgauacagugcuuggaagaaucuuuuuuuuuuuuuuuuuuuuuugugcgacgaucacagagaacuucuauucaugcaggucugcucuag

SEQ ID NO: 1017 - protein, 14 aa, Artificial Sequence
  W(Arg12)Cys
WRRRRRRRRRRRRC

SEQ ID NO: 1018 - RNA, 987 nt, Artificial Sequence
  IL12B
augugccaccaacaacucgucaucuccugguucucccucgucuuccuagccuccccacucgucgccaucugggaacucaaaaaagacguauacgucgucgaacucgacugguaccccgacgccccaggagaaauggucgucuuaaccugcgacacacccgaagaagacgguaucaccuggacccucgaccaauccuccgaaguccuaggcuccggcaagacccucaccauccaagucaaagaauuuggcgacgcaggacaauacaccugucacaaaggcggcgaaguccucagccacagccuucuccuacuccauaaaaaagaagacggcaucugguccacugacauccucaaagaccaaaaagaacccaaaaauaaaaccuuccuccgcugcgaagccaaaaacuacuccggccgauuuaccuguugguggcuaaccacaaucagcaccgaccucaccuucucagucaaauccucccgcggcucaucugacccccaaggcgucacaugcggcgccgccaccuuauccgccgaacgcguccgcggcgacaacaaagaauacgaauacuccgucgaaugucaagaagauuccgccugccccgccgccgaagaaucacuccccaucgaagucauggucgacgcaguccacaaacucaaauacgaaaacuacaccuccuccuucuucauccgcgacauaauaaaacccgacccacccaaaaaccuccaacucaaaccacucaaaaacucccgacaagucgaagucuccugggaguaccccgacaccugguccacaccacacuccuacuucucccucaccuucugcguccaaguccaaggcaaauccaaacgcgaaaaaaaagaccgcguuuucacagacaaaaccuccgccacaguaauaugccgcaaaaacgccuccaucuccguccgggcccaagaccgcuacuacuccuccuccugguccgagugggccucaguccccugcagcuga

SEQ ID NO: 1019 - RNA, 987 nt, Artificial Sequence
  IL12B
augugccaccaacaacucgucaucuccugguucucccucgucuuccuagccuccccacucgucgccaucugggaacucaaaaaagacguauacgucgucgaacucgacugguaccccgacgccccaggagaaauggucguccuaaccugcgacacacccgaagaagacgguaucaccuggacccucgaccaauccuccgaaguccuaggcuccggcaagacccucaccauccaagucaaagaauuuggcgacgcaggacaauacaccugucacaaaggcggcgaaguccucagccacagccuucuccuacuccauaaaaaagaagacggcaucugguccacugacauccucaaagaccaaaaagaacccaaaaauaaaaccuuccuccgcugcgaagccaaaaacuacuccggccgauucaccuguugguggcuaaccacaaucagcaccgaccucaccuucucagucaaauccucccgcggcucaucugacccccaaggcgucacaugcggcgccgccacccucuccgccgaacgcguccgcggcgacaacaaagaauacgaauacuccgucgaaugucaagaagacuccgccugccccgccgccgaagaaucacuccccaucgaagucauggucgacgcaguccacaaacucaaauacgaaaacuacaccuccuccuucuucauccgcgacauaauaaaacccgacccacccaaaaaccuccaacucaagccacucaaaaacucccgacaagucgaagucuccugggaguaccccgacaccugguccacaccacacuccuacuucucccucaccuucugcguccaaguccaaggcaaauccaaacgcgaaaaaaaagaccgcguuuucacagacaaaaccuccgccacaguaauaugccgcaaaaacgccuccaucuccguccgggcccaagaccgcuacuacuccuccuccugguccgagugggccucaguccccugcagcuga

SEQ ID NO: 1020 - RNA, 987 nt, Artificial Sequence; identical to SEQ ID NO: 1019
  IL12B

SEQ ID NO: 1021 - RNA, 987 nt, Artificial Sequence; identical to SEQ ID NO: 1019
  IL12B

SEQ ID NO: 1022 - RNA, 867 nt, Artificial Sequence
  PDCD1
augcaaauaccccaagcccccuggccggucgucugggccguccuccaacucggcuggcgccccggaugguuccucgauucccccgaccgcccguggaauccgcccaccuucucccccgcccucuuagucgucaccgaaggcgacaacgcgaccuucaccuguuccuuuucgaacaccucagaauccuucguccucaacugguaccgcaugucccccuccaaccaaaccgacaaacucgccgccuuccccgaagaccgaucccaacccggccaagauugccgcuuccgcgucacacaauuacccaauggacgcgacuuucacauguccgucguccgcgcccgccgcaacgacuccggcaccuaccucugcggcgccaucucguuagcccccaaagcccaaaucaaagaaucgcucagagccgaauuacgcgucaccgaacggcgcgccgaaguccccacugcgcaccccucccccucgccccgccccgccggccaauuccaaacccucgucgucggcguugucggcggcuuauuaggcucacucguccuccucgucuggguacucgccgucaucugcucccgcgccgcgcgcggcaccaucggcgcgcgccgcaccggacaacccuuaaaagaagaccccuccgccguccccgucuucuccgucgacuacggcgaacucgacuuccaauggcgcgaaaaaacgccggaaccacccgucccgugcguccccgaacaaacagaauacgcgaccaucgucuucccguccggcaugggcacauccucacccgcccgccgaggcuccgccgacggcccccgauccgcccaacccuuacgccccgaagacggccacugcuccuggcccuuauga

SEQ ID NO: 1023 - RNA, 867 nt, Artificial Sequence
  PDCD1
augcaaaucccccaagcccccuggccggucgucugggccguccuccaacucggcuggcgccccggaugguuccucgacucccccgaccgcccguggaauccgcccaccuucucccccgcccucuuagucgucaccgaaggcgacaacgcgaccuucaccuguuccuucucgaacaccucagaauccuucguccucaacugguaccgcaugucccccuccaaccaaaccgacaaacucgccgccuuccccgaagaccgaucccaacccggccaagacugccgcuuccgcgucacacaauuacccaauggacgcgacuuucacauguccgucguccgcgcccgccgcaacgacuccggcaccuaccucugcggcgccaucucguuagcccccaaagcccaaaucaaagaaucgcucagagccgaauuacgcgucaccgaacggcgcgccgaaguccccacugcgcaccccucccccucgccccgccccgccggccaauuccaaacccucgucgucggcguugucggcggcuuauuaggcucacucguccuccucgucuggguacucgccgucaucugcucccgcgccgcgcgcggcaccaucggcgcgcgccgcaccggacaacccuuaaaagaagaccccuccgccguccccgucuucuccgucgacuacggcgaacucgacuuccaauggcgcgaaaaaacgccggaaccacccgucccgugcguccccgaacaaacagaauacgcgaccaucgucuucccguccggcaugggcacauccucacccgcccgccgaggcuccgccgacggcccccgauccgcccaacccuuacgccccgaagacggccacugcuccuggccccucuga

SEQ ID NO: 1024 - RNA, 867 nt, Artificial Sequence
  PDCD1
augcaaaucccccaagcccccuggccggucgucugggccguccuccaacucggcuggcgccccggaugguuccucgacucccccgaccgcccguggaauccgcccaccuucucccccgcccucuuagucgucaccgaaggcgacaacgcgaccuucaccuguuccuucucgaacaccucagaauccuucguccucaacugguaccgcaugucccccuccaaccaaaccgacaaacucgccgccuuccccgaagaccgaucccaacccggccaagacugccgcuuccgcgucacacaauuacccaacggacgcgacuuucacauguccgucguccgcgcccgccgcaacgacuccggcaccuaccucugcggcgccaucucgcucgcccccaaagcccaaaucaaagaaucgcucagagccgaacuccgcgucaccgaacggcgcgccgaaguccccacugcgcaccccucccccucgccccgccccgccggccaauuccaaacccucgucgucggcguugucggcggccucuuaggcucacucguccuccucgucuggguacucgccgucaucugcucccgcgccgcgcgcggcaccaucggcgcgcgccgcaccggacaacccuuaaaagaagaccccuccgccguccccgucuucuccgucgacuacggcgaacucgacuuccaauggcgcgaaaaaacgccggaaccacccgucccgugcguccccgaacaaacagaauacgcgaccaucgucuucccguccggcaugggcacauccucacccgcccgccgaggcuccgccgacggcccccgauccgcccaacccuuacgccccgaagacggccacugcuccuggccccucuga

SEQ ID NO: 1025 - RNA, 786 nt, Artificial Sequence
  CD40LG
augaucgaaaccuacaaucaaaccucgccccgcagcgccgcaacaggccuccccaucuccaugaaaaucuucauguaccuccucaccgucuuccuaaucacccaaaugaucggcuccgccuuauucgccgucuaccuccaccgccgccucgacaaaaucgaagacgaacgcaaccuccacgaagacuuugucuucaugaaaacuauccaacgaugcaacaccggcgaacgaucccuaucccucuuaaacugcgaagaaauaaaaucgcaauucgaaggauucgucaaagacaucaugcuaaacaaagaagaaaccaaaaaagaaaauuccuucgaaaugcaaaaaggcgaccaaaacccccaaaucgcagcccacgucaucucagaagcaucuuccaaaaccaccuccguccuccaaugggccgaaaaaggcuacuacaccaugucaaacaaccucgucacgcucgaaaacggcaaacaacucaccgucaaacgccaaggcuuauacuacaucuacgcacaagucaccuucugcuccaaccgcgaagcauccucccaagcccccuucaucgccucccucugucucaaaucccccggccgcuucgaacgcauccuccuccgcgccgcaaauacccauuccuccgccaaaccaugcggccaacaauccauccaccucggcggcgucuucgaacuccaacccggcgccuccgucuucgucaacgucaccgaccccucccaaguaucccauggaaccggcuucaccuccuucggccuccucaaacucuga

SEQ ID NO: 1026 - RNA, 786 nt, Artificial Sequence
  CD40LG
augaucgaaaccuacaaucaaaccucgccccgcagcgccgcaacaggccuccccaucuccaugaaaaucuucauguaccuccucaccgucuuccuaaucacccaaaugaucggcuccgccuuauucgccgucuaccuccaccgccgccucgacaaaaucgaagacgaacgcaaccuccacgaagacuuugucuucaugaaaacuauccaacgaugcaacaccggcgaacgaucccuaucccuccucaacugcgaagaaauaaaaucgcaauucgaaggauucgucaaagacaucaugcuaaacaaagaagaaaccaaaaaagaaaacuccuucgaaaugcaaaaaggcgaccaaaacccccaaaucgcagcccacgucaucucagaagcaucuuccaaaaccaccuccguccuccaaugggccgaaaaaggcuacuacaccaugucaaacaaccucgucacgcucgaaaacggcaaacaacucaccgucaaacgccaaggccucuacuacaucuacgcacaagucaccuucugcuccaaccgcgaagcauccucccaagcccccuucaucgccucccucugccucaaaucccccggccgcuucgaacgcauccuccuccgcgccgcaaauacccauuccuccgccaaaccaugcggccaacaauccauccaccucggcggcgucuucgaacuccaacccggcgccuccgucuucgucaacgucaccgaccccucccaaguaucccauggaaccggcuucaccuccuucggccuccucaaacucuga

SEQ ID NO: 1027 - RNA, 786 nt, Artificial Sequence
  CD40LG
augaucgaaaccuacaaucaaaccucgccccgcagcgccgcaacaggccuccccaucuccaugaaaaucuucauguaccuccucaccgucuuccuaaucacccaaaugaucggcuccgcccuauucgccgucuaccuccaccgccgccucgacaaaaucgaagacgaacgcaaccuccacgaagacuuugucuucaugaaaacuauccaacgaugcaacaccggcgaacgaucccuaucccuccucaacugcgaagaaauaaaaucccaauucgaaggauucgucaaagacaucaugcuaaacaaagaagaaaccaaaaaagaaaacuccuucgaaaugcaaaaaggcgaccaaaacccccaaaucgcagcccacgucaucucagaagcaucuuccaaaaccaccuccguccuccaaugggccgaaaaaggcuacuacaccaugucaaacaaccucgucacccucgaaaacggcaaacaacucaccgucaaacgccaaggccucuacuacaucuacgcacaagucaccuucugcuccaaccgcgaagcauccucccaagcccccuucaucgccucccucugccucaaaucccccggccgcuucgaacgcauccuccuccgcgccgcaaauacccacuccuccgccaaaccaugcggccaacaauccauccaccucggcggcgucuucgaacuccaacccggcgccuccgucuucgucaacgucaccgaccccucccaaguaucccauggaaccggcuucaccuccuucggccuccucaaacucuga

SEQ ID NO: 1028 - RNA, 786 nt, Artificial Sequence; identical to SEQ ID NO: 1027
  CD40LG

SEQ ID NO: 1029 - RNA, 1347 nt, Artificial Sequence
  Ipilimumab_HC
caggugcaguuagucgagucgggcgggggcguggugcagcccgggcgcucccuccgguuaucgugcgccgccuccggcuucaccuucucguccuacaccaugcacuggguccgccaggcgccggggaagggcuuagagugggugacguucaucucguacgacggcaacaacaaguacuacgccgacuccgugaaggggcgguucaccaucucgcgcgacaacuccaagaacacccucuacuuacagaugaacucguuacgggccgaggacaccgccaucuacuacugcgcccgcacgggcuggcucgggcccuucgacuacuggggccaggggaccuuagucaccguguccucggcguccaccaagggccccucgguguuccccuuagccccguccucgaaguccacgucgggcgggaccgccgcccucggcugcuuagucaaggacuacuuccccgagcccgugaccguguccuggaacucgggggcguuaaccucgggcguccacacguuccccgccgugcuccaguccucgggcuuauacuccuuaucgucggucgucacggucccgucgucgucgcucgggacgcagacguacaucugcaacgucaaccacaagccgucgaacacgaaggucgacaagcgggucgagccgaagucgugcgacaagacgcacacgugcccgccgugcccggcgccggaguuauuaggggggccgucggucuuccucuucccgccgaagccgaaggacacguuaaugaucucgcgcacgccggaggucacgugcgucgucgucgacgucucgcacgaggacccggaggucaaguucaacugguacgucgacggggucgagguccacaacgcgaagacgaagccgcgggaggagcaguacaacucgacguaccgcgucgucucggucuuaacgguccuccaccaggacugguuaaacgggaaggaguacaagugcaaggucucgaacaaggcguuaccggcgccgaucgagaagacgaucucgaaggcgaaggggcagccgcgggagccgcaggucuacacgcucccgccgucgcgcgacgaguuaacgaagaaccaggucucguuaacgugccucgucaagggguucuacccgucggacaucgcggucgagugggagucgaacgggcagccggagaacaacuacaagacgacgccgccggucuuagacucggacgggucguucuucuuauacucgaagcucacggucgacaagucgcgguggcagcaggggaacgucuucucgugcucggucaugcacgaggcguuacacaaccacuacacgcagaagucguuaucgcucucgccggggaaguga

SEQ ID NO: 1030 - RNA, 1347 nt, Artificial Sequence
  Ipilimumab_HC
caggugcaguuagucgagucgggcgggggcguggugcagcccgggcgcucccuccgguuaucgugcgccgccuccggcuucaccuucucguccuacaccaugcacuggguccgccaggcgccggggaagggcuuagagugggugacguucaucucguacgacggcaacaacaaguacuacgccgacuccgugaaggggcgguucaccaucucgcgcgacaacuccaagaacacccucuacuuacagaugaacucguuacgggccgaggacaccgccaucuacuacugcgcccgcacgggcuggcucgggcccuucgacuacuggggccaggggaccuuagucaccguguccucggcguccaccaagggccccucgguguuccccuuagccccguccucgaaguccacgucgggcgggaccgccgcccucggcugcuuagucaaggacuacuuccccgagcccgugaccguguccuggaacucgggggcguuaaccucgggcguccacacguuccccgccgugcuccaguccucgggcuuauacuccuuaucguccguggucaccgugccgucguccucgcucgggacccagaccuacaucugcaacgucaaccacaagccgucgaacacgaaggucgacaagcgggucgagccgaagucgugcgacaagacgcacacgugcccgccgugcccggcgccggaguuauuaggggggccgucggucuuccucuucccgccgaagccgaaggacacguuaaugaucucgcgcacgccggaggucacgugcgucgucgucgacgucucgcacgaggacccggaggucaaguucaacugguacgucgacggggucgagguccacaacgcgaagacgaagccgcgggaggagcaguacaacucgacguaccgcgucgucucggucuuaacgguccuccaccaggacugguuaaacgggaaggaguacaagugcaaggucucgaacaaggcguuaccggcgccgaucgagaagacgaucucgaaggcgaaggggcagccgcgggagccgcaggucuacacgcucccgccgucgcgcgacgaguuaacgaagaaccaggucucguuaacgugccucgucaagggguucuacccgucggacaucgcggucgagugggagucgaacgggcagccggagaacaacuacaagacgacgccgccggucuuagacucggacgggucguucuucuuauacucgaagcucacggucgacaagucgcgguggcagcaggggaacgucuucucgugcucggucaugcacgaggcguuacacaaccacuacacgcagaagucguuaucgcucucgccggggaaguga

SEQ ID NO: 1031 - RNA, 1347 nt, Artificial Sequence
  Ipilimumab_HC
caggugcaguuagucgagucgggcgggggcguggugcagcccgggcgcucccuccgguuaucgugcgccgccuccggcuucaccuucucguccuacaccaugcacuggguccgccaggcgccggggaagggcuuagagugggugacguucaucucguacgacggcaacaacaaguacuacgccgacuccgugaaggggcgguucaccaucucgcgcgacaacuccaagaacacccucuacuuacagaugaacucguuacgggccgaggacaccgccaucuacuacugcgcccgcacgggcuggcucgggcccuucgacuacuggggccaggggaccuuagucaccguguccucggcguccaccaagggccccucgguguuccccuuagccccguccucgaaguccacgucgggcgggaccgccgcccucggcugcuuagucaaggacuacuuccccgagcccgugaccguguccuggaacucgggggcguuaaccucgggcguccacacguuccccgccgugcuccaguccucgggcuuauacuccuuaucguccguggucaccgugccgucguccucgcucgggacccagaccuacaucugcaacgugaaccacaagcccuccaacacgaaggucgacaagcggguggagcccaagucgugcgacaagacccacacgugcccgccgugcccggcgccggaguuauuaggggggccgucggucuuccucuucccgccgaagccgaaggacacguuaaugaucucgcgcacgccggaggucacgugcgucgucgucgacgucucgcacgaggacccggaggucaaguucaacugguacgucgacggggucgagguccacaacgcgaagacgaagccgcgggaggagcaguacaacucgacguaccgcgucgucucggucuuaacgguccuccaccaggacugguuaaacgggaaggaguacaagugcaaggucucgaacaaggcguuaccggcgccgaucgagaagacgaucucgaaggcgaaggggcagccgcgggagccgcaggucuacacgcucccgccgucgcgcgacgaguuaacgaagaaccaggucucguuaacgugccucgucaagggguucuacccgucggacaucgcggucgagugggagucgaacgggcagccggagaacaacuacaagacgacgccgccggucuuagacucggacgggucguucuucuuauacucgaagcucacggucgacaagucgcgguggcagcaggggaacgucuucucgugcucggucaugcacgaggcguuacacaaccacuacacgcagaagucguuaucgcucucgccggggaaguga

SEQ ID NO: 1032 - RNA, 1347 nt, Artificial Sequence
  Ipilimumab_HC
caggugcaguuagucgagucgggcgggggcguggugcagcccgggcgcucccuccgguuaucgugcgccgccuccggcuucaccuucucguccuacaccaugcacuggguccgccaggcgccggggaagggcuuagagugggugacguucaucucguacgacggcaacaacaaguacuacgccgacuccgugaaggggcgguucaccaucucgcgcgacaacuccaagaacacccucuacuuacagaugaacucguuacgggccgaggacaccgccaucuacuacugcgcccgcacgggcuggcucgggcccuucgacuacuggggccaggggaccuuagucaccguguccucggcguccaccaagggccccucgguguuccccuuagccccguccucgaaguccacgucgggcgggaccgccgcccucggcugcuuagucaaggacuacuuccccgagcccgugaccguguccuggaacucgggggcguuaaccucgggcguccacacguuccccgccgugcuccaguccucgggcuuauacuccuuaucguccguggucaccgugccgucguccucgcucgggacccagaccuacaucugcaacgugaaccacaagcccuccaacacgaaggucgacaagcggguggagcccaagucgugcgacaagacccacacgugcccgcccugccccgcccccgaguuauuaggcgggcccuccgucuuccucuucccgccgaagccgaaggacacguuaaugaucucgcgcacgccggaggucacgugcgucgucgucgacgucucgcacgaggacccggaggucaaguucaacugguacgucgacggggucgagguccacaacgcgaagacgaagccgcgggaggagcaguacaacucgacguaccgcgucgucucggucuuaacgguccuccaccaggacugguuaaacgggaaggaguacaagugcaaggucucgaacaaggcguuaccggcgccgaucgagaagacgaucucgaaggcgaaggggcagccgcgggagccgcaggucuacacgcucccgccgucgcgcgacgaguuaacgaagaaccaggucucguuaacgugccucgucaagggguucuacccgucggacaucgcggucgagugggagucgaacgggcagccggagaacaacuacaagacgacgccgccggucuuagacucggacgggucguucuucuuauacucgaagcucacggucgacaagucgcgguggcagcaggggaacgucuucucgugcucggucaugcacgaggcguuacacaaccacuacacgcagaagucguuaucgcucucgccggggaaguga

SEQ ID NO: 1033 - RNA, 1347 nt, Artificial Sequence
  Ipilimumab_HC
caggugcaguuagucgagucgggcgggggcguggugcagcccgggcgcucccuccgguuaucgugcgccgccuccggcuucaccuucucguccuacaccaugcacuggguccgccaggcgccggggaagggcuuagagugggugacguucaucucguacgacggcaacaacaaguacuacgccgacuccgugaaggggcgguucaccaucucgcgcgacaacuccaagaacacccucuacuuacagaugaacucguuacgggccgaggacaccgccaucuacuacugcgcccgcacgggcuggcucgggcccuucgacuacuggggccaggggaccuuagucaccguguccucggcguccaccaagggccccucgguguuccccuuagccccguccucgaaguccacgucgggcgggaccgccgcccucggcugcuuagucaaggacuacuuccccgagcccgugaccguguccuggaacucgggggcguuaaccucgggcguccacacguuccccgccgugcuccaguccucgggcuuauacuccuuaucguccguggucaccgugccgucguccucgcucgggacccagaccuacaucugcaacgugaaccacaagcccuccaacacgaaggucgacaagcggguggagcccaagucgugcgacaagacccacacgugcccgcccugccccgcccccgaguuauuaggcgggcccuccguguuccucuucccgcccaagcccaaggacaccuuaaugaucucgcgcacccccgaggugacgugcgucgucgucgacgucucgcacgaggacccggaggucaaguucaacugguacgucgacggggucgagguccacaacgcgaagacgaagccgcgggaggagcaguacaacucgacguaccgcgucgucucggucuuaacgguccuccaccaggacugguuaaacgggaaggaguacaagugcaaggucucgaacaaggcguuaccggcgccgaucgagaagacgaucucgaaggcgaaggggcagccgcgggagccgcaggucuacacgcucccgccgucgcgcgacgaguuaacgaagaaccaggucucguuaacgugccucgucaagggguucuacccgucggacaucgcggucgagugggagucgaacgggcagccggagaacaacuacaagacgacgccgccggucuuagacucggacgggucguucuucuuauacucgaagcucacggucgacaagucgcgguggcagcaggggaacgucuucucgugcucggucaugcacgaggcguuacacaaccacuacacgcagaagucguuaucgcucucgccggggaaguga

SEQ ID NO: 1034 - RNA, 1347 nt, Artificial Sequence
  Ipilimumab_HC
caggugcaguuagucgagucgggcgggggcguggugcagcccgggcgcucccuccgguuaucgugcgccgccuccggcuucaccuucucguccuacaccaugcacuggguccgccaggcgccggggaagggcuuagagugggugacguucaucucguacgacggcaacaacaaguacuacgccgacuccgugaaggggcgguucaccaucucgcgcgacaacuccaagaacacccucuacuuacagaugaacucguuacgggccgaggacaccgccaucuacuacugcgcccgcacgggcuggcucgggcccuucgacuacuggggccaggggaccuuagucaccguguccucggcguccaccaagggccccucgguguuccccuuagccccguccucgaaguccacgucgggcgggaccgccgcccucggcugcuuagucaaggacuacuuccccgagcccgugaccguguccuggaacucgggggcguuaaccucgggcguccacacguuccccgccgugcuccaguccucgggcuuauacuccuuaucguccguggucaccgugccgucguccucgcucgggacccagaccuacaucugcaacgugaaccacaagcccuccaacacgaaggucgacaagcggguggagcccaagucgugcgacaagacccacacgugcccgcccugccccgcccccgaguuauuaggcgggcccuccguguuccucuucccgcccaagcccaaggacaccuuaaugaucucgcgcacccccgaggugaccugcgucguggucgacgugucccacgaggacccggaggucaaguucaacugguacguggacggcguggagguccacaacgcgaagacgaagccgcgggaggagcaguacaacucgacguaccgcgucgucucggucuuaacgguccuccaccaggacugguuaaacgggaaggaguacaagugcaaggucucgaacaaggcguuaccggcgccgaucgagaagacgaucucgaaggcgaaggggcagccgcgggagccgcaggucuacacgcucccgccgucgcgcgacgaguuaacgaagaaccaggucucguuaacgugccucgucaagggguucuacccgucggacaucgcggucgagugggagucgaacgggcagccggagaacaacuacaagacgacgccgccggucuuagacucggacgggucguucuucuuauacucgaagcucacggucgacaagucgcgguggcagcaggggaacgucuucucgugcucggucaugcacgaggcguuacacaaccacuacacgcagaagucguuaucgcucucgccggggaaguga

SEQ ID NO: 1035 - RNA, 1347 nt, Artificial Sequence
  Ipilimumab_HC
caggugcaguuagucgagucgggcgggggcguggugcagcccgggcgcucccuccgguuaucgugcgccgccuccggcuucaccuucucguccuacaccaugcacuggguccgccaggcgccggggaagggcuuagagugggugacguucaucucguacgacggcaacaacaaguacuacgccgacuccgugaaggggcgguucaccaucucgcgcgacaacuccaagaacacccucuacuuacagaugaacucguuacgggccgaggacaccgccaucuacuacugcgcccgcacgggcuggcucgggcccuucgacuacuggggccaggggaccuuagucaccguguccucggcguccaccaagggccccucgguguuccccuuagccccguccucgaaguccacgucgggcgggaccgccgcccucggcugcuuagucaaggacuacuuccccgagcccgugaccguguccuggaacucgggggcguuaaccucgggcguccacacguuccccgccgugcuccaguccucgggcuuauacuccuuaucguccguggucaccgugccgucguccucgcucgggacccagaccuacaucugcaacgugaaccacaagcccuccaacacgaaggucgacaagcggguggagcccaagucgugcgacaagacccacacgugcccgcccugccccgcccccgaguuauuaggcgggcccuccguguuccucuucccgcccaagcccaaggacaccuuaaugaucucgcgcacccccgaggugaccugcgucguggucgacgugucccacgaggacccggaggucaaguucaacugguacguggacggcguggagguccacaacgccaagaccaagccccgggaggagcaguacaacucgaccuaccgcguggugucggucuuaacgguccuccaccaggacugguuaaacgggaaggaguacaagugcaaggucucgaacaaggcguuaccggcgccgaucgagaagacgaucucgaaggcgaaggggcagccgcgggagccgcaggucuacacgcucccgccgucgcgcgacgaguuaacgaagaaccaggucucguuaacgugccucgucaagggguucuacccgucggacaucgcggucgagugggagucgaacgggcagccggagaacaacuacaagacgacgccgccggucuuagacucggacgggucguucuucuuauacucgaagcucacggucgacaagucgcgguggcagcaggggaacgucuucucgugcucggucaugcacgaggcguuacacaaccacuacacgcagaagucguuaucgcucucgccggggaaguga

SEQ ID NO: 1036 - RNA, 1347 nt, Artificial Sequence
  Ipilimumab_HC
caggugcaguuagucgagucgggcgggggcguggugcagcccgggcgcucccuccgguuaucgugcgccgccuccggcuucaccuucucguccuacaccaugcacuggguccgccaggcgccggggaagggcuuagagugggugacguucaucucguacgacggcaacaacaaguacuacgccgacuccgugaaggggcgguucaccaucucgcgcgacaacuccaagaacacccucuacuuacagaugaacucguuacgggccgaggacaccgccaucuacuacugcgcccgcacgggcuggcucgggcccuucgacuacuggggccaggggaccuuagucaccguguccucggcguccaccaagggccccucgguguuccccuuagccccguccucgaaguccacgucgggcgggaccgccgcccucggcugcuuagucaaggacuacuuccccgagcccgugaccguguccuggaacucgggggcguuaaccucgggcguccacacguuccccgccgugcuccaguccucgggcuuauacuccuuaucguccguggucaccgugccgucguccucgcucgggacccagaccuacaucugcaacgugaaccacaagcccuccaacacgaaggucgacaagcggguggagcccaagucgugcgacaagacccacacgugcccgcccugccccgcccccgaguuauuaggcgggcccuccguguuccucuucccgcccaagcccaaggacaccuuaaugaucucgcgcacccccgaggugaccugcgucguggucgacgugucccacgaggacccggaggucaaguucaacugguacguggacggcguggagguccacaacgccaagaccaagccccgggaggagcaguacaacucgaccuaccgcgugguguccgucuuaacggugcuccaccaggacugguuaaacgggaaggaguacaagugcaaggugucgaacaaggccuuacccgcgcccaucgagaagaccaucucgaaggcgaaggggcagccgcgggagccgcaggucuacacgcucccgccgucgcgcgacgaguuaacgaagaaccaggucucguuaacgugccucgucaagggguucuacccgucggacaucgcggucgagugggagucgaacgggcagccggagaacaacuacaagacgacgccgccggucuuagacucggacgggucguucuucuuauacucgaagcucacggucgacaagucgcgguggcagcaggggaacgucuucucgugcucggucaugcacgaggcguuacacaaccacuacacgcagaagucguuaucgcucucgccggggaaguga

SEQ ID NO: 1037 - RNA, 648 nt, Artificial Sequence
  Ipilimumab_LC
gagaucguguuaacccagucgcccggcacccucuccuuaucgccgggggagcgcgccacguuauccugccgggccucgcaguccgucggcucguccuaccucgcgugguaccagcagaagcccgggcaggcgccccgcuuauuaaucuacggcgccuucucgcgggccaccgggauccccgaccgcuucuccggcucgggcuccgggaccgacuucacccucacgaucucgcgguuagagccggaggacuucgccguguacuacugccagcaguacggcuccucgcccuggaccuucgggcagggcaccaagguggagaucaagcgcaccgucgccgcccccuccguguucaucuucccgcccucggacgagcaguuaaaguccgggacggccucgguggucugccucuuaaacaacuucuacccccgggaggccaaggugcaguggaaggucgacaacgcguuacagucggggaacucgcaggagucggucacggagcaggacucgaaggacucgacguacucgcucucgucgacguuaacguuaucgaaggcggacuacgagaagcacaaggucuacgcgugcgaggucacgcaccaggggcucucgucgccggucacgaagucguucaaccgcggggagugcuga

SEQ ID NO: 1038 - RNA, 648 nt, Artificial Sequence
  Ipilimumab_LC
gagaucguguuaacccagucgcccggcacccucuccuuaucgccgggggagcgcgccacguuauccugccgggccucgcaguccgucggcucguccuaccucgcgugguaccagcagaagcccgggcaggcgccccgcuuauuaaucuacggcgccuucucgcgggccaccgggauccccgaccgcuucuccggcucgggcuccgggaccgacuucacccucacgaucucgcgguuagagccggaggacuucgccguguacuacugccagcaguacggcuccucgcccuggaccuucgggcagggcaccaagguggagaucaagcgcaccgucgccgcccccuccguguucaucuucccgcccucggacgagcaguuaaaguccgggacggccucgguggucugccucuuaaacaacuucuacccccgggaggccaaggugcaguggaagguggacaacgcguuacaguccggcaacucgcaggagucggucacggagcaggacucgaaggacucgacguacucgcucucgucgacguuaacguuaucgaaggcggacuacgagaagcacaaggucuacgcgugcgaggucacgcaccaggggcucucgucgccggucacgaagucguucaaccgcggggagugcuga

SEQ ID NO: 1039 - RNA, 648 nt, Artificial Sequence
  Ipilimumab_LC
gagaucguguuaacccagucgcccggcacccucuccuuaucgccgggggagcgcgccacguuauccugccgggccucgcaguccgucggcucguccuaccucgcgugguaccagcagaagcccgggcaggcgccccgcuuauuaaucuacggcgccuucucgcgggccaccgggauccccgaccgcuucuccggcucgggcuccgggaccgacuucacccucacgaucucgcgguuagagccggaggacuucgccguguacuacugccagcaguacggcuccucgcccuggaccuucgggcagggcaccaagguggagaucaagcgcaccgucgccgcccccuccguguucaucuucccgcccucggacgagcaguuaaaguccgggacggccucgguggucugccucuuaaacaacuucuacccccgggaggccaaggugcaguggaagguggacaacgcguuacaguccggcaacucgcaggagucggucaccgagcaggacuccaaggacucgaccuacucgcucucgucgacguuaacguuaucgaaggcggacuacgagaagcacaaggucuacgcgugcgaggucacgcaccaggggcucucgucgccggucacgaagucguucaaccgcggggagugcuga

SEQ ID NO: 1040 - RNA, 648 nt, Artificial Sequence
  Ipilimumab_LC
gagaucguguuaacccagucgcccggcacccucuccuuaucgccgggggagcgcgccacguuauccugccgggccucgcaguccgucggcucguccuaccucgcgugguaccagcagaagcccgggcaggcgccccgcuuauuaaucuacggcgccuucucgcgggccaccgggauccccgaccgcuucuccggcucgggcuccgggaccgacuucacccucacgaucucgcgguuagagccggaggacuucgccguguacuacugccagcaguacggcuccucgcccuggaccuucgggcagggcaccaagguggagaucaagcgcaccgucgccgcccccuccguguucaucuucccgcccucggacgagcaguuaaaguccgggacggccucgguggucugccucuuaaacaacuucuacccccgggaggccaaggugcaguggaagguggacaacgcguuacaguccggcaacucgcaggagucggucaccgagcaggacuccaaggacucgaccuacucccucucguccaccuuaacguuaucgaaggcggacuacgagaagcacaaggucuacgcgugcgaggucacgcaccaggggcucucgucgccggucacgaagucguucaaccgcggggagugcuga

SEQ ID NO: 1041 - RNA, 648 nt, Artificial Sequence
  Ipilimumab_LC
gagaucguguuaacccagucgcccggcacccucuccuuaucgccgggggagcgcgccacguuauccugccgggccucgcaguccgucggcucguccuaccucgcgugguaccagcagaagcccgggcaggcgccccgcuuauuaaucuacggcgccuucucgcgggccaccgggauccccgaccgcuucuccggcucgggcuccgggaccgacuucacccucacgaucucgcgguuagagccggaggacuucgccguguacuacugccagcaguacggcuccucgcccuggaccuucgggcagggcaccaagguggagaucaagcgcaccgucgccgcccccuccguguucaucuucccgcccucggacgagcaguuaaaguccgggacggccucgguggucugccucuuaaacaacuucuacccccgggaggccaaggugcaguggaagguggacaacgcguuacaguccggcaacucgcaggagucggucaccgagcaggacuccaaggacucgaccuacucccucucguccaccuuaacguuaucgaaggccgacuacgagaagcacaagguguacgccugcgaggugacgcaccaggggcucucgucgccggucacgaagucguucaaccgcggggagugcuga

SEQ ID NO: 1042 - protein, 162 aa, Artificial Sequence
  solPD1
MQIPQAPWPVVWAVLQLGWRPGWFLALLVVTEGDNATFTCSFSNTSESFVLNWYRMSPSNQTDKLAAFPEDRSQPGQDCRFRVTQLPNGRDFHMSVVRARRNDSGTYLCGAISLAPKAQIKESLRAELRVTERRAEVPTAHPSPSPRPAGQPEFRGGGSGGG

SEQ ID NO: 1043 - RNA, 486 nt, Artificial Sequence
  solPD1
augcagaucccccaggccccguggcccguggucugggccgugcugcagcucggcuggcgccccgggugguuccuggcgcugcucguggucaccgagggcgacaacgccaccuucacgugcagcuucuccaacaccagcgaguccuucgugcugaacugguaccggaugagccccuccaaccagaccgacaagcuggccgccuucccggaggaccgcagccagcccgggcaggacugccgguuccgcgugacccagcuccccaacggccgggacuuccacauguccgucgugcgcgcccggcgcaacgacagcgggacguaccugugcggcgcgaucucccuggcccccaaggcccagaucaaggagagccuccgggccgagcugcgcgugaccgagcggcgcgcggaggucccgaccgcccaccccucccccagcccccggccggccggccagcccgaguuccgcgggggcggguccggcgggggc

SEQ ID NO: 1044 - RNA, 486 nt, Artificial Sequence
  solPD1
augcagaucccccaggcccccuggcccgucgucugggccguccuccagcucggcuggcgccccggcugguuccucgcccuccucgucgucaccgagggcgacaacgccaccuucaccugcuccuucuccaacaccuccgaguccuucguccucaacugguaccgcaugucccccuccaaccagaccgacaagcucgccgccuuccccgaggaccgcucccagcccggccaggacugccgcuuccgcgucacccagcuccccaacggccgcgacuuccacauguccgucguccgcgcccgccgcaacgacuccggcaccuaccucugcggcgccaucucccucgcccccaaggcccagaucaaggagucccuccgcgccgagcuccgcgucaccgagcgccgcgccgagguccccaccgcccaccccucccccuccccccgccccgccggccagcccgaguuccgcggcggcggcuccggcggcggc

SEQ ID NO: 1045 - RNA, 486 nt, Artificial Sequence
  solPD1
augcagaucccccaagccccuuggccaguggucugggcuguucugcagcucggcuggagaccggggugguuccuugcacuguuggugguaaccgagggagacaacgccacauuuacuugcagcuucuccaauacgucugaaucauuuguguuaaacugguacaggaugagucccagcaaucagaccgauaagcuggcggcuuucccugaggaccggucccagccaggucaagauugucgcuuucgagucacacagcuacccaacggccgugacuuccacaugucugugguuagagccaggcggaaugauucggggacuuaucucugcggagcaauuucacuggccccuaaagcucagauaaaggaaagccuucgcgcagagcugagagugaccgaaaggcgggccgaggucccaacagcucaucccaguccuuccccacgcccggccggccagcccgaguuucgaggugggggaucuggcggcggg

SEQ ID NO: 1046 - RNA, 486 nt, Artificial Sequence
  solPD1
augcagaucccccaggcccccuggcccguggugugggccgugcugcagcugggcuggagacccggcugguuccuggcccugcugguggugaccgagggcgacaacgccaccuucaccugcagcuucagcaacaccagcgagagcuucgugcugaacugguacagaaugagccccagcaaccagaccgacaagcuggccgccuuccccgaggacagaagccagcccggccaggacugcagauucagagugacccagcugcccaacggcagagacuuccacaugagcguggugagagccagaagaaacgacagcggcaccuaccugugcggcgccaucagccuggcccccaaggcccagaucaaggagagccugagagccgagcugagagugaccgagagaagagccgaggugcccaccgcccaccccagccccagccccagacccgccggccagcccgaguucagaggcggcggcagcggcggcggc

SEQ ID NO: 1047 - RNA, 486 nt, Artificial Sequence
  solPD1
augcagaucccccaagccccuuggccgguggucugggcuguucugcagcucggcuggagacccgggugguuccuggcccuucugguggugaccgagggagacaacgcgacauuuacgugcagcuucuccaauaccucugagagcuuuguccucaacugguaccggauguccccuucuaaucagacagauaagcuggcugccuuccccgaagaccgcagccagccuggccaagauuguagauuucgggugacccagcuucccaacgggcgcgacuuccacauguccguugugagagcccggcgcaaugauucuggaacauaucugugcggcgcuauuagccucgccccuaaagcucagaucaaggaaucccugagagccgagcugcgggucaccgaacgcagagcggaggugccgacagcccaucccagcccuucuccccggccugcugggcagcccgaguuucgcggaggcggcuccgggggaggc

SEQ ID NO: 1048 - RNA, 486 nt, Artificial Sequence
  solPD1
augcaaauaccacaagcuccauggccaguaguaugggcaguauuacaauuaggauggagaccaggaugguuuuuagcauuacuaguaguaacagaaggagauaaugcaacauuuacauguaguuuuucaaauacaucagaaucauuuguauuaaauugguauagaaugucaccaucaaaucaaacagauaaauuagcagcauuuccagaagacagaucacaaccaggacaagauugcagauucagaguaacacaauuaccaaacggaagagacuuucauaugucaguaguaagagcaagaagaaaugacucaggaacuuauuuaugcggagcaauaucauuagcaccaaaagcacaaauaaaagaaucacuaagagcagaauuaagaguaacagaaagaagagcagaaguucccacagcacauccaucaccaucaccaagaccagcaggacaaccagaauuuagaggaggaggaucaggaggagga

SEQ ID NO: 1049 - RNA, 486 nt, Artificial Sequence
  solPD1
augcagaucccccaagccccauggccgguggucugggcagugcugcagcucggcuggaggcccgggugguuccuggccuugcugguagugaccgagggugacaacgcgacuuuuaccugcagcuucuccaauacgagugaauccuuuguccucaacugguaccggauguccccaaguaaucagacugauaagcuggccgcauuccccgaggaccgcagccagccaggccaagauuguagguuucgggugacccaguugcccaacgggcgcgacuuccacauguccguggucagggcccggcgcaaugauagcggcaccuaucugugcggugcaauuucccucgccccaaaagcgcagaucaaggaaagucugagggccgagcugcgggugacugaacgcagggcagagguaccgaccgcccaucccagcccaagcccccggccagccgggcagcccgaguuucgcggcggcgggagcgguggcggg

SEQ ID NO: 1050 - RNA, 486 nt, Artificial Sequence
  solPD1
augcaaaucccacaagccccauggcccgucgucugggccguccuccaacucggcuggcgcccaggcugguuccuagcacuccuagucgucaccgaaggcgacaacgcaaccuucaccugcuccuucuccaacaccucagaaucauucguccucaacugguaccgcaugucccccuccaaccaaaccgacaaacucgcagccuuccccgaagacagaucacaacccggccaagacugcagauuccgcgucacccaacuccccaacggacgcgacuuccacauguccguaguccgcgcccgccgaaacgacuccggcaccuaccuaugcggcgccaucucacucgccccaaaagcacaaaucaaagaaucacucagagcagaacuacgagucaccgaaagacgcgcagaaguaccaaccgcccacccaucccccucaccccgacccgccggccaacccgaauuccgcggaggcggcuccggcggcggc

SEQ ID NO: 1051 - RNA, 486 nt, Artificial Sequence
  solPD1
augcaaaucccacaagcccccuggcccgucgucugggccguacuacaacucggauggcgacccggcugguuccuagcccuccuagucgucaccgaaggcgacaacgccaccuucaccugcuccuucucaaacacauccgaaucauucguccucaacugguaccgcaugucccccuccaaccaaaccgacaaacucgccgccuuccccgaagaccgaucccaacccggccaagacugccgauuccgcgucacccaacuacccaacggccgcgacuuccacauguccgucguccgcgcccgccgcaacgacucaggcaccuaccucuguggcgccaucucccucgcaccaaaagcccaaaucaaagaaucccuccgcgccgaacuccgcgucacagaacgcagagccgaaguccccaccgcacacccaucaccauccccccgcccagccggccaacccgaauuccgcggaggcggauccggcggcgga

SEQ ID NO: 1052 - RNA, 486 nt, Artificial Sequence
  solPD1
augcaaaucccccaagccccauggcccgucgucugggccguccuacaacucggcuggcgccccggcugguuccucgcccuccucgucgucaccgaaggcgacaacgccaccuucaccugcuccuucuccaacacaucagaauccuucguccucaacugguaccgaaugucccccucaaaccaaaccgacaaacucgccgccuuccccgaagaccgcucccaacccggccaagacugccgcuuccgagucacccaacuacccaacggccgcgacuuccacauguccgucguccgcgcccgccgcaacgacuccggcaccuaccuaugcggcgccaucucccucgcccccaaagcccaaaucaaagaaucacuccgcgccgaacuccgcgucaccgaacgccgcgccgaaguccccaccgcccaccccucccccuccccccgccccgccggacaacccgaauuccgcggcggcggaucaggcggcggc

SEQ ID NO: 1053 - RNA, 486 nt, Artificial Sequence
  solPD1
augcaaauaccacaagcaccauggccuguaguaugggcaguauuacaauuaggauggagaccaggaugguuuuuagcacuauuaguaguaacagaaggagauaaugcaacauuuacauguucauuuaguaauacaucagaaucauuuguauuaaauugguauagaaugaguccaaguaaucaaacagauaaauuagcagcauuuccagaagacagaagccaaccaggacaagauuguagauuuagaguaacacaauuaccaaauggaagagauuuucauaugaguguaguaagagcaagaagaaaugacucaggaacauaucuaugcggagcaauaagcuuagcaccaaaagcacaaauaaaagaaagcuuaagagcagaauuaagaguaacagaaagaagagcagaaguaccaacagcacauccaaguccaaguccaagaccagcaggacaaccagaauuuagaggaggaggaagugggggagga

SEQ ID NO: 1054 - RNA, 486 nt, Artificial Sequence
  solPD1
augcaaauaccacaagcaccauggccaguaguaugggcaguauuacaauuaggauggagaccaggaugguuuuuagcacuacuaguaguaacagaaggagauaaugcaacauuuacauguucauuuucaaauacaucagaaucauuuguacuaaauugguauagaaugucaccaucaaaucaaacagacaaacuagcagcauuuccagaagacagaucacaaccaggacaagauugcagauucagaguaacacaacuaccaaauggaagagacuuucauaugucaguaguaagagcaagaagaaaugauucaggaacauaucuauguggagcaauaucauuagcuccaaaagcacaaauaaaagaaucauuaagagcagaauuaagaguaacagaaagaagagcagaaguaccaacagcacauccaucaccaagcccaagaccagcaggacaaccagaauuuagaggaggaggaucaggaggagga

SEQ ID NO: 1055 - RNA, 547 nt, Artificial Sequence
  R3630_SalI
gggagaaagcucaagcuuauccaaguaggcuggucaccuguacaacguagccgguauuuuuuuuuuuuuuuuuuuuuugaccgucucaagguccaaguuagucugccuauaaaggugcggauccacagcugaugaaagacuugugcgguacgguuaaucuccccuuuuuuuuuuuuuuuuuuuuuaguaaaugcgucuacugaauccagcgaugaugcuggcccagaucuucgaccacaagugcauauaguagucaucgagggucgacuuuuuuuuuuuuuuuuuuuuuuuggcccaguucugagacuucgcuagagacuacaguuacagcugcaguaguaaccacugcggcuauugcaggaaaucccguucagguuuuuuuuuuuuuuuuuuuuuccgcucacuaugauuaagaaccagguggagugucacugcucucgaggucucacgagagcgcucgauacagugcuuggaagaaucuuuuuuuuuuuuuuuuuuuuuugugcgacgaucacagagaacuucuauucaugcaggucugcucuag

SEQ ID NO: 1056 - RNA, 547 nt, Artificial Sequence
  R3630_AatII
gggagaaagcucaagcuuauccaaguaggcuggucaccuguacaacguagccgguauuuuuuuuuuuuuuuuuuuuuugaccgucucaagguccaaguuagucugccuauaaaggugcggauccacagcugaugaaagacuugugcgguacgguuaaucuccccuuuuuuuuuuuuuuuuuuuuuaguaaaugcgucuacugaauccagcgaugaugcuggcccagaucuucgaccacaagugcauauaguagucaucgagggucgccuuuuuuuuuuuuuuuuuuuuuuuggcccaguucugagacgucgcuagagacuacaguuacagcugcaguaguaaccacugcggcuauugcaggaaaucccguucagguuuuuuuuuuuuuuuuuuuuuccgcucacuaugauuaagaaccagguggagugucacugcucucgaggucucacgagagcgcucgauacagugcuuggaagaaucuuuuuuuuuuuuuuuuuuuuuugugcgacgaucacagagaacuucuauucaugcaggucugcucuag

SEQ ID NO: 1057 - protein, 18 aa, Artificial Sequence
  CysPeptid CysHis6Arg4His6Cys
CHHHHHHRRRRHHHHHHC

SEQ ID NO: 1058 - RNA, 1632 nt, Artificial Sequence
  IL12
augugccaccaacaacucgucaucuccugguucucccucgucuuccuagccuccccacucgucgccaucugggaacucaaaaaagacguauacgucgucgaacucgacugguaccccgacgccccaggagaaauggucguccuaaccugcgacacacccgaagaagacgguaucaccuggacccucgaccaauccuccgaaguccuaggcuccggcaagacccucaccauccaagucaaagaauuuggcgacgcaggacaauacaccugucacaaaggcggcgaaguccucagccacagccuucuccuacuccauaaaaaagaagacggcaucugguccacugacauccucaaagaccaaaaagaacccaaaaauaaaaccuuccuccgcugcgaagccaaaaacuacuccggccgauucaccuguugguggcuaaccacaaucagcaccgaccucaccuucucagucaaauccucccgcggcucaucugacccccaaggcgucacaugcggcgccgccacccucuccgccgaacgcguccgcggcgacaacaaagaauacgaauacuccgucgaaugucaagaagacuccgccugccccgccgccgaagaaucacuccccaucgaagucauggucgacgcaguccacaaacucaaauacgaaaacuacaccuccuccuucuucauccgcgacauaauaaaacccgacccacccaaaaaccuccaacucaagccacucaaaaacucccgacaagucgaagucuccugggaguaccccgacaccugguccacaccacacuccuacuucucccucaccuucugcguccaaguccaaggcaaauccaaacgcgaaaaaaaagaccgcguuuucacagacaaaaccuccgccacaguaauaugccgcaaaaacgccuccaucuccguccgggcccaagaccgcuacuacuccuccuccugguccgagugggccucaguccccugcagcggcagcaccuccgggagcggcaagcccggguccggcgaggggagcaccaagggccggaaccugccgguggccacccccgaccccggcauguuccccugccugcaccacagccagaaccuccugcgcgccguguccaacaugcugcagaaggcccggcagacgcucgaguucuacccgugcaccagcgaggagaucgaccacgaggacaucaccaaggacaagaccuccacggucgaggccugccugccccuggagcucaccaagaacgagagcugccugaacucccgcgagaccagcuucaucaccaacggguccugccuggcgagccggaagacguccuucaugauggcccucugccugagcuccaucuacgaggaccugaagauguaccagguggaguucaagaccaugaacgccaagcuccugauggaccccaagcgccagaucuuccuggaccagaacaugcucgccgugaucgacgagcugaugcaggcgcugaacuucaacagcgagaccgucccccagaaguccagccucgaggagccggacuucuacaagaccaagaucaagcugugcauccugcuccacgccuuccggauccgcgccgugacgaucgaccgggugauguccuaccugaacgccagcuga

SEQ ID NO: 1059 - RNA, 984 nt, Artificial Sequence
  IL12B
augugccaccaacaacucgucaucuccugguucucccucgucuuccuagccuccccacucgucgccaucugggaacucaaaaaagacguauacgucgucgaacucgacugguaccccgacgccccaggagaaauggucgucuuaaccugcgacacacccgaagaagacgguaucaccuggacccucgaccaauccuccgaaguccuaggcuccggcaagacccucaccauccaagucaaagaauuuggcgacgcaggacaauacaccugucacaaaggcggcgaaguccucagccacagccuucuccuacuccauaaaaaagaagacggcaucugguccacugacauccucaaagaccaaaaagaacccaaaaauaaaaccuuccuccgcugcgaagccaaaaacuacuccggccgauuuaccuguugguggcuaaccacaaucagcaccgaccucaccuucucagucaaauccucccgcggcucaucugacccccaaggcgucacaugcggcgccgccaccuuauccgccgaacgcguccgcggcgacaacaaagaauacgaauacuccgucgaaugucaagaagauuccgccugccccgccgccgaagaaucacuccccaucgaagucauggucgacgcaguccacaaacucaaauacgaaaacuacaccuccuccuucuucauccgcgacauaauaaaacccgacccacccaaaaaccuccaacucaaaccacucaaaaacucccgacaagucgaagucuccugggaguaccccgacaccugguccacaccacacuccuacuucucccucaccuucugcguccaaguccaaggcaaauccaaacgcgaaaaaaaagaccgcguuuucacagacaaaaccuccgccacaguaauaugccgcaaaaacgccuccaucuccguccgggcccaagaccgcuacuacuccuccuccugguccgagugggccucaguccccugcagc

SEQ ID NO: 1060 - RNA, 984 nt, Artificial Sequence; identical to SEQ ID NO: 139
  IL12B

SEQ ID NO: 1061 - RNA, 984 nt, Artificial Sequence; identical to SEQ ID NO: 139
  IL12B

SEQ ID NO: 1062 - RNA, 984 nt, Artificial Sequence; identical to SEQ ID NO: 139
  IL12B

SEQ ID NO: 1063 - protein, 4 aa, Artificial sequence
  Synthetic peptide
KALA

SEQ ID NO: 1064 - protein, 7 aa, Artificial sequence
  Synthetic peptide
RRRRRRR

SEQ ID NO: 1065 - protein, 8 aa, Artificial sequence
  Synthetic peptide
RRRRRRRR

SEQ ID NO: 1066 - protein, 9 aa, Artificial sequence
  Synthetic peptide
RRRRRRRRR

SEQ ID NO: 1067 - protein, 12 aa, Artificial sequence
  Synthetic peptide
HHHRRRRRRRRR

SEQ ID NO: 1068 - protein, 12 aa, Artificial sequence
  Synthetic peptide
RRRRRRRRRHHH

SEQ ID NO: 1069 - protein, 15 aa, Artificial sequence
  Synthetic peptide
HHHRRRRRRRRRHHH

SEQ ID NO: 1070 - protein, 15 aa, Artificial sequence
  Synthetic peptide
YSSRRRRRRRRRSSY

SEQ ID NO: 1071 - protein, 12 aa, Artificial sequence
  Synthetic peptide
RKHRKHRKHRKH

SEQ ID NO: 1072 - protein, 8 aa, Artificial sequence
  Synthetic peptide
YRKHRKHR

SEQ ID NO: 1073 - protein, 12 aa, Artificial sequence
  Synthetic peptide
RRRRRRRRRRRR

SEQ ID NO: 1074 - protein, 14 aa, Artificial sequence
  Synthetic peptide
WRRRRRRRRRRRRC

SEQ ID NO: 1075 - DNA, 42 bp, Artificial sequence; identical to SEQ ID NO: 408
  Synthetic oligonucleotide

SEQ ID NO: 1076 - DNA, 75 bp, Artificial sequence; identical to SEQ ID NO: 410
  Synthetic oligonucleotide

SEQ ID NO: 1077 - protein, 26 aa, Artificial sequence
  Synthetic peptide
RRRRRRRRRRRRCCRRRRRRRRRRRR

SEQ ID NO: 1078 - protein, 28 aa, Artificial sequence
  Synthetic peptide
WRRRRRRRRRRRRCCRRRRRRRRRRRRW

SEQ ID NO: 1079 - protein, 40 aa, Artificial sequence
  Synthetic peptide
RRRRRRRRRRRRCCRRRRRRRRRRRRCCRRRRRRRRRRRR

1. A method for the treatment or prophylaxis of a tumor or cancer disease selected from the group consisting of cutaneous melanoma (cMEL), cutaneous squamous cell carcinoma (cSCC), head and neck squamous cell carcinoma (HNSCC), adenoid cystic carcinoma (ACC), cutaneous T-cell lymphoma, preferably cutaneous T-cell lymphoma of mycosis fungoides subtype, and vulvar squamous cell cancer (VSCC), wherein the tumor or the cancer disease is preferably at an advanced stage and/or refractory to standard therapy comprising administering to a subject in need thereof an immunostimulatory RNA (isRNA).

2. The method according to claim 1, wherein the isRNA is administered intratumorally, intradermally, intramuscularly or subcutaneously.

3. (canceled)

4. The method according to claim 1, wherein the isRNA is a non-coding RNA.

5. The method according to claim 1, wherein the isRNA comprises a nucleic acid sequence according to formula (I)
(GₗXₘGₙ),
wherein:
G is guanosine (guanine), uridine (uracil) or an analogue of guanosine (guanine) or uridine (uracil);
X is guanosine (guanine), (uridine) uracil, adenosine (adenine), thymidine (thymine), cytidine (cytosine) or an analogue of the above-mentioned nucleotides (nucleosides);
l is an integer from 1 to 40,
wherein
when l=1 G is guanosine (guanine) or an analogue thereof,
when l>1 at least 50% of the nucleotides (nucleosides) are guanosine (guanine) or an analogue thereof;
m is an integer and is at least 3;
wherein
when m=3 X is uridine (uracil) or an analogue thereof,
when m>3 at least 3 successive uridines (uracils) or analogues of uridine (uracil) occur;
n is an integer from 1 to 40,
wherein
when n=1 G is guanosine (guanine) or an analogue thereof,
when n>1 at least 50% of the nucleotides (nucleosides) are guanosine (guanine) or an analogue thereof; or
a nucleic acid sequence according to formula (III)
(NᵤGₗXₘGₙNᵥ)ₐ
wherein:
G is guanosine (guanine), uridine (uracil) or an analogue of guanosine (guanine) or uridine (uracil), preferably guanosine (guanine) or an analogue thereof;
X is guanosine (guanine), uridine (uracil), adenosine (adenine), thymidine (thymine), cytidine (cytosine), or an analogue of these nucleotides (nucleosides), preferably uridine (uracil) or an analogue thereof;
N is a nucleic acid sequence having a length of about 4 to 50, preferably of about 4 to 40, more preferably of about 4 to 30 or 4 to 20 nucleic acids, each N independently being selected from guanosine (guanine), uridine (uracil), adenosine (adenine), thymidine (thymine), cytidine (cytosine) or an analogue of these nucleotides (nucleosides);
a is an integer from 1 to 20, preferably from 1 to 15, most preferably from 1 to 10;
l is an integer from 1 to 40,
wherein when l=1, G is guanosine (guanine) or an analogue thereof,
when l>1, at least 50% of these nucleotides (nucleosides) are guanosine (guanine) or an analogue thereof;
m is an integer and is at least 3;
wherein when m=3, X is uridine (uracil) or an analogue thereof, and
when m>3, at least 3 successive uridines (uracils) or analogues of uridine (uracil) occur;
n is an integer from 1 to 40,
wherein when n=1, G is guanosine (guanine) or an analogue thereof,
when n>1, at least 50% of these nucleotides (nucleosides) are guanosine (guanine) or an analogue thereof;
u,v may be independently from each other an integer from 0 to 50,
preferably wherein when u=0, v≥1, or when v=0, u≥1;
wherein the nucleic acid molecule of formula (III) has a length of at least 50 nucleotides, preferably of at least 100 nucleotides, more preferably of at least 150 nucleotides, even more preferably of at least 200 nucleotides and most preferably of at least 250 nucleotides.

6. The method according to claim 1, wherein the isRNA comprises at least one nucleic acid sequence according to any one of SEQ ID NOs: 433 to 437, 1014 to 1016.

7. The method according to claim 1, wherein the isRNA is complexed with a cationic or polycationic compound, preferably with a cationic or polycationic polymer, a cationic or polycationic peptide or protein, a cationic or polycationic polysaccharide and/or a cationic or polycationic lipid.

8. The method according to claim 7, wherein the cationic or polycationic compound is a polymeric carrier.

9. The method according to claim 8, wherein the polymeric carrier is formed by a disulfide-crosslinked cationic component, preferably a disulfide-crosslinked cationic peptide, wherein the disulfide-crosslinked cationic peptide preferably comprises a peptide according to formula V
(Arg)ₗ;(Lys)ₘ;(His)ₙ;(Orn)ₒ;(Xaa)ₓ, (formula (V),
wherein l+m+n+o+x=8-15, and l, m, n or o independently of each other may be any number selected from 0, 1, 2, 3, 4, 5, 6, 7, 8, 9, 10, 11, 12, 13, 14 or 15, provided that the overall content of Arg, Lys, His and Orn represents at least 50% of all amino acids of the oligopeptide; and Xaa may be any amino acid selected from native (=naturally occurring) or non-native amino acids except of Arg, Lys, His or Orn; and x may be any number selected from 0, 1, 2, 3 or 4, provided, that the overall content of Xaa does not exceed 50% of all amino acids of the oligopeptide;
a peptide according to formula Va
{(Arg)ₗ;(Lys)ₘ;(His)ₙ;(Orn)ₒ;(Xaa′)ₓ(Cys)_{y}} formula (Va),
wherein (Arg)ₗ;(Lys)ₘ;(His)ₙ;(Orn)ₒ; and x are as defined for formula V, Xaa′ is any amino acid selected from native (=naturally occurring) or non-native amino acids except of Arg, Lys, His, Orn or Cys and y is any number selected from 0, 1, 2, 3, 4, 5, 6, 7, 8, 9, 10, 11, 12, 13, 14, 15, 16, 17, 18, 19, 20, 21-30, 31-40, 41-50, 51-60, 61-70, 71-80 and 81-90, provided that the overall content of Arg (Arginine), Lys (Lysine), His (Histidine) and Orn (Ornithine) represents at least 10% of all amino acids of the oligopeptide;
a peptide according to formula Vb
Cys1{(Arg)ₗ;(Lys)ₘ;(His)ₙ;(Orn)ₒ;(Xaa)ₓ}Cys2 formula (Vb)
wherein empirical formula {(Arg)ₗ;(Lys)ₘ;(His)ₙ;(Orn)ₒ;(Xaa)ₓ} is as defined for formula (V) and forms a core of an amino acid sequence according to (semiempirical) formula (V) and wherein Cys1 and Cys2 are cysteines proximal to, or terminal to (Arg)ₗ;(Lys)ₘ;(His)ₙ;(Orn)ₒ;(Xaa)ₓ; and/or

10. The method according to claim 8, wherein the polymeric carrier comprises at least one of the disulfide-crosslinked cationic peptides Cys-Arg₁₂ or Cys-Arg₁₂-Cys.

11. (canceled)

12. The method according to claim 1, wherein the isRNA is complexed with one or more lipids, thereby forming liposomes, lipid nanoparticles and/or lipoplexes.

13. The method according to claim 1, wherein the treatment comprises administration of at least one additional pharmaceutically active ingredient.

14. The method according to claim 13, wherein the at least one additional pharmaceutically active ingredient is a compound that is used in the treatment of a tumor or cancer disease preferably selected from the group consisting of cutaneous melanoma (cMEL), cutaneous squamous cell carcinoma (cSCC), head and neck squamous cell carcinoma (HNSCC), adenoid cystic carcinoma (ACC), cutaneous T-cell lymphoma, preferably cutaneous T-cell lymphoma of mycosis fungoides subtype, and vulvar squamous cell cancer (VSCC), wherein the tumor or the cancer disease is preferably at an advanced stage and/or refractory to standard therapy.

15. The method according to claim 13, wherein the at least one additional pharmaceutically active ingredient is a checkpoint modulator.

16. The method according to claim 15, wherein the checkpoint modulator is selected from the group consisting of a PD-1 inhibitor, a PD-L1 inhibitor, a CTLA-4 inhibitor, a LAG3 inhibitor, a TIM3 inhibitor, a TIGIT-inhibitor an OX40 stimulator, a 4-1BB stimulator, a CD40L stimulator, a CD28 stimulator and a GITR stimulator.

17. The method according to claim 16, wherein the checkpoint modulator is a PD 1 inhibitor or a PD-L1 inhibitor.

18-19. (canceled)

20. The method according to claim 1, wherein the treatment comprises administration of at least one coding RNA, preferably at least one mRNA.

21. The method according to claim 20, wherein the at least one coding RNA comprises at least one coding sequence encoding at least one peptide or protein comprising at least one peptide or protein selected from the group consisting of
IL-12,
CD40L,
a decoy PD-1 receptor, and
an antagonistic antibody directed against CTLA4.

22-48. (canceled)

49. The method according to claim 20, wherein the at least one coding RNA comprises at least one coding sequence encoding a peptide or protein comprising a tumor antigen.

50-66. (canceled)

67. The method according to claim 1, wherein the treatment comprises chemotherapy, radiation therapy and/or surgery.

68-73. (canceled)
